(19) United States
(12) Patent Application Publication
(10) Pub. No.: US 2020/0283811 A1
(43) Pub. Date: Sep. 10, 2020

(54) DEGRADATION PATHWAY FOR PENTOSE AND HEXOSE SUGARS

(71) Applicant: Braskem S.A., Sao Paulo (BR)

(72) Inventors: Daniel Johannes KOCH, Campinas (BR); Lucas Pederson PARIZZI, Campinas (BR); Felipe GALZERANI, Campinas (BR); Jean Marie FRANCOIS, Plaisance-du-Touch (FR); Sophie LAJUS, Ayguesvives (FR)

(21) Appl. No.: 16/796,426

(22) Filed: Feb. 20, 2020

Related U.S. Application Data
(60) Provisional application No. 62/808,258, filed on Feb. 20, 2019.

(51) Int. Cl. C12P 17/18; C12P 17/02; C12N 15/52; C12N 1/20; C12P 7/28; C12P 5/02

(52) U.S. Cl. CPC C12P 17/18; C12Y 101/01043; C12N 15/52; C12N 1/20; C12P 7/28; C12P 5/026; C12Y 202/01002; C12Y 501/03001; C12Y 503/01006; C12Y 102/01009; C12Y 207/02003; C12Y 504/02; C12Y 401/02022; C12Y 207/01011; C12Y 101/01301; C12Y 301/01031; C12P 17/02

(57) ABSTRACT

The present application relates to recombinant microorganisms useful in the biosynthesis of monoethylene glycol (MEG) or glycolic acid (GA), or MEG and one or more co-product, from one or more pentose and/or hexose sugars. Also provided are methods of producing MEG (or GA), or MEG (or GA) and one or more co-product, from one or more pentose and/or hexose sugars using the recombinant microorganisms, as well as compositions comprising the recombinant microorganisms and/or the products MEG (or GA), or MEG and one or more co-product.

### CROSS-REFERENCE TO RELATED APPLICATIONS

[0001] This application claims priority to U.S. Provisional Application No. 62/808,258 filed Feb. 20, 2019, entitled “DEGRADATION PATHWAY FOR PENTOSE AND HEXOSE SUGARS”, the disclosures of which are incorporated by reference herein.

### FIELD OF THE INVENTION

[0002] This application relates to recombinant microorganisms useful in the biosynthesis of monoethylene glycol or monoethylene glycol and one or more co-product from one or more pentose and/or hexose sugars. This application additionally relates to recombinant microorganisms useful in the biosynthesis of glycolic acid or glycolic acid and one or more co-product from one or more pentose and/or hexose sugars. The application further relates to methods of producing monoethylene glycol or monoethylene glycol and one or more co-product from one or more pentose and/or hexose sugars using the recombinant microorganisms, as well as methods of producing glycolic acid or glycolic acid and one or more co-product from one or more pentose and/or hexose sugars using the recombinant microorganisms. The application further relates to compositions comprising one or more of these compounds and/or the recombinant microorganisms.

### STATEMENT REGARDING SEQUENCE LISTING

[0003] The Sequence Listing associated with this application is provided in text format in lieu of a paper copy, and is hereby incorporated by reference into the specification. The name of the text file containing the Sequence Listing is BRSK-007_02US_ST25.txt. The text file is about 641 KB, was created on Feb. 18, 2020, and is being submitted electronically via EFS-Web.

### BACKGROUND

[0004] A large number of chemical compounds are currently derived from petrochemicals. Compounds such as monoethylene glycol (MEG), glycolic acid, acetone, isopropanol (IPA), propene, serine, glycine, monoethanolamine, and ethylenediamine are valuable as raw material in the production of products like polyethylene terephthalate (PET) resins (from MEG), plastic polypropylene (from propene), polyglycolic acid and other biocompatible copolymers (from glycolic acid) and polyurethane fibers (from ethylenediamine). Alkenes (such as ethylene, propylene, different butenes, and pentenes, for example) are used in the plastics industry, fuels, and in other areas of the chemical industry. For example, isobutene is a small, highly reactive molecule that is used extensively as a platform chemical to manufacture a wide variety of products including fuel additives, rubber and rubber additives, and specialty chemicals.

[0005] However, the compounds are currently produced from precursors that originate from fossil fuels, which contribute to climate change. To develop more environmentally friendly processes for the production of MEG, researchers have engineered microorganisms with biosynthetic pathways to produce MEG. However, these pathways are challenging to implement, with loss of product yield, redox balance and excess biomass formation being some major obstacles to overcome.

[0006] Thus there exists a need for improved biosynthesis pathways for the production of MEG and other chemical compounds useful in industrial and pharmaceutical applications.

### SUMMARY OF THE DISCLOSURE

[0007] This disclosure allows the conversion of a variety of C5 and C6 sugars, without carbon loss, to broadly usable key intermediates glyceraldehyde-3-phosphate (G3P) and glycolaldehyde, relying mainly on natural, proven reactions, by introducing just one new reaction catalyzed by a pentose-phosphate aldolase.

[0008] In some embodiments, the enzyme reactions of the disclosure allow for high yield MEG (or glycolic acid), or MEG (or GA) and one or more coproducts produced from glucose, xylose or various other sugars than can enter into the pentose phosphate pathway. In other embodiments, the enzyme reactions of the disclosure allow for high yield MEG (or glycolic acid), or MEG (or GA) and co-products produced from a variety of sugar oligomers which can be readily broken down to the corresponding monomers. In further embodiments, the enzyme reactions of the disclosure allow for high yield MEG (or glycolic acid), or MEG (or GA) and co-products production from a mixture of C5 and/or C6 sugar monomers and/or oligomers.

[0009] In some embodiments, the present methods solve or reduce the following problems compared to other glucose based MEG (or glycolic acid) production methods: ATP shortage; large NADH excess; low overall product yield potential. In further embodiments, the present methods further allow utilization of D-glucose, D-xylose, and/or various other sugars or mixtures with the same high yield of MEG or glycolic acid compared to other glucose based MEG or glycolic acid production methods.

[0010] In some embodiments, the present methods solve the following challenges and problems compared to other D-xylose based MEG (or glycolic acid) production methods, as well as other D-xylose based MEG and co-product production methods: a process depending on xylose (availability/market limitations, high price or low purity, slower and less efficient uptake than D-glucose); glucose induced inhibition of D-xylose utilization. In further embodiments, the present methods further allow utilization of D-glucose, D-xylose, and/or various other sugars or mixtures with the same high yield of MEG or glycolic acid or MEG and one or more co-product compared to other D-xylose based MEG (or glycolic acid) production methods, as well as other D-xylose based MEG and co-product production methods.

[0011] In one aspect, the present disclosure provides a recombinant microorganism comprising one or more biochemical pathway that produces one or more products derived from D-glyceraldehyde-3-phosphate (G3P) and glycolaldehyde from one or more pentose and/or hexose sugars via a pentose-phosphate intermediate.

[0012] In some embodiments, the pentose-phosphate intermediate is D-ribose-5-phosphate, D-ribulose-5-phosphate or D-xylulose-5-phosphate and wherein the enzyme have D-ribose-5-phosphate, D-ribulose-5-phosphate or D-xylulose-5-phosphate aldolase activity.

[0013] In some embodiments, a ribulokinase enzyme catalyzes the phosphorylation of D-ribulose to D-ribulose-5-phosphate. In some embodiments, the ribulokinase enzyme is encoded by E. Coli AraB. In some embodiments, the ribulokinase enzyme is encoded by a nucleic acid sequence having at least 70% sequence identity, at least 80% sequence identity, or at least 90% sequence identity to AraB from E. coli (SEQ ID NO: 288).

[0014] In some embodiments, a ribokinase enzyme catalyzes the phosphorylation of D-ribose to D-ribose-5-phosphate. In some embodiments, the ribokinase enzyme is encoded by E. Coli rbsK. In some embodiments, the ribulokinase enzyme is encoded by a nucleic acid sequence having at least 70% sequence identity, at least 80% sequence identity, or at least 90% sequence identity to rbsK from E. coli (SEQ ID NO: 290).

[0015] In some embodiments, a xylulokinase enzyme catalyzes the phosphorylation of D-xylulose to D-xylulose-5-phosphate. In some embodiments, the ribokinase enzyme is encoded by T. maritima XuK. In some embodiments, the ribulokinase enzyme is encoded by a nucleic acid sequence having at least 70% sequence identity, at least 80% sequence identity, or at least 90% sequence identity to XuK from T. maritima (SEQ ID NO: 291).

[0016] In one embodiment, the recombinant microorganism co-produces monoethylene glycol (MEG) and one or more co-products. In another embodiment, the one or more co-products are selected from acetone, isopropanol, propene, L-serine, glycine, monoethanolamine (MEA), ethylenediamine, or a combination thereof. In yet a further embodiment, the one or more product is selected from monoethylene glycol (MEG) and glycolic acid (GA).

[0017] Therefore, in one embodiment, the application relates to a recombinant microorganism comprising one or more biochemical pathway comprising at least one enzyme having an activity that converts one or more pentose and/or hexose sugars in a lossless conversion to pentose-phosphate intermediate and comprising at least one enzyme having a pentose-phosphate aldolase activity that converts the pentose-phosphate intermediate to glycolaldehyde and D-glyceraldehyde-3-phosphage (G3P).

[0018] In one embodiment, the application relates to a recombinant microorganism comprising one or more biochemical pathway comprising at least one enzyme having an activity that converts one or more pentose and/or hexose sugars in a lossless conversion to D-ribose-5-phosphate intermediate and comprising at least one enzyme having a D-ribose-5-phosphate aldolase (DERA) activity that converts the D-ribose-5-phosphate intermediate to glycolaldehyde and D-glyceraldehyde-3-phosphage (G3P).

[0019] In some embodiments, the recombinant microorganism comprises expression of at least one enzyme having transketolase activity and expression of at least one enzyme having pentose-phosphate aldolase activity. In some embodiments, the recombinant microorganism comprises expression of at least one enzyme having transketolase activity and expression of at least one enzyme having D-ribose-5-phosphate aldolase (DERA) activity. In some embodiments, the enzyme having transketolase activity is encoded by an amino acid sequence having at least 70% sequence identity, at least 80% sequence identity, or at least 90% sequence identity to tktA from E. coli. In other embodiments, the enzyme having transketolase activity is tktA from E. coli. In some embodiments, the enzyme having transketolase activity is encoded by an amino acid sequence having at least 70% sequence identity at least 80% sequence identity, or at least 90% sequence identity to tktB from E. coli. In other embodiments, the enzyme having transketolase activity is tktB from E. coli. In another embodiment, the one or more nucleic acid molecules encoding the enzyme having transketolase activity comprises an amino acid sequence selected from the group consisting of SEQ ID NOs: 148 and 150. In some embodiments, the one or more nucleic acid molecules encoding the enzyme having transketolase activity is tktA, or homolog thereof. In some embodiments, the one or more nucleic acid molecules encoding the enzyme having transketolase activity is tktB, or homolog thereof. In a further embodiment, the one or more nucleic acid molecule encoding the enzyme having transketolase activity is encoded by a nucleic acid sequence selected from the group consisting of SEQ ID NOs: 147 and 149. In some embodiments, the enzyme having D-ribose-5-phosphate aldolase activity is encoded by an amino acid sequence having at least 70% sequence identity, at least 80% sequence identity, or at least 90% sequence identity to deoC from E. coli. In other embodiments, the enzyme having D-ribose-5-phosphate aldolase activity is deoC from E. coli.

[0020] In some embodiments the B. Caldolyticus pentose-phosphate aldolase is encoded by a nucleic acid sequence having at least 70% sequence identity, at least 80% sequence identity, or at least 90% sequence identity to:

(SEQ ID NO: 286)
ATGACGATGAATATCGCGAAAATGATCGATCATACGCTGCTCAAACCGGA
AGCGACAGAACAACAAATCGTGCAACTGTGCACGGAAGCAAAGCAATACG
GCTTTGCTGCCGTGTGCGTCAACCCAACGTGGGTGAAAACGGCGGCGCGC
GAGCTTTCCGGCACGGATGTCCGCGTCTGCACGGTCATCGGCTTTCCACT
TGGGGCAACGACGCCGGAAACAAAGGCGTTTGAAACAACGAACGCCATCG
AAAACGGCGCTCGCGAAGTCGACATGGTGATCAACATCGGTGCGTTAAAA
AGCGGGCAAGACGAGCTTGTCGAGCGCGACATTCGTGCGGTTGTCGAAGC
GGCGGCTGGCAGGGCGCTTGTCAAAGTGATCGTTGAAACGGCGCTTTTGA
CCGATGAGGAAAAAGTGCGCGCCTGCCAGCTCGCAGTGAAAGCCGGCGCT
GATTATGTGAAAACGTCGACCGGGTTTTCCGGCGGAGGTGCGACGGTGGA
GGATGTGGCGCTGATGCGGAAAACGGTCGGCGACAGAGCAGGCGTCAAAG
CATCAGGCGGCGTCCGTGACTGGAAAACCGCTGAGGCGATGATCAACGCC
GGCGCGACGCGCATCGGCACAAGCTCTGGGGTGGCGATCGTCACCGGCGG
GACGGGCCGCGCTGACTACTAA.

[0021] In some embodiments the B. Caldolyticus pentose-phosphate aldolase is encoded by a cDNA optimized sequence comprising a nucleic acid sequence having at least 70% sequence identity, at least 80% sequence identity, or at least 90% sequence identity to:

(SEQ ID NO: 287)
CCATGGCAAACATCGCGAAGATGATTGACCACACCCTGCTGAAACCG
GAGGCGACCGAACAGCAAATCGTTCAGCTGTGCACCGAGGCGAAACAATA
CGGCTTCGCGGCGGTGTGCGTTAACCCGACCTGGGTTAAGACCGCGGCGC
GTGAACTGAGCGGTACCGACGTGCGTGTTTGCACCGTGATTGGTTTCCCG
CTGGGTGCGACCACCCCGGAGACCAAAGCGTTTGAAACCACCAACGCGAT
TGAGAACGGCGCGCGTGAAGTTGATATGGTGATCAACATTGGCGCGCTGA
AGAGCGGTCAGGACGAGCTGGTTGAGCGTGATATTCGTGCGGTGGTTGAG
GCTGCGGCGGGTCGTGCGCTGGTGAAAGTTATTGTGGAAACCGCGCTGCT
GACCGACGAGGAAAAAGTGCGTGCGTGCCAACTGGCGGTTAAGGCGGGTG
CGGATTACGTGAAAACCAGCACCGGTTTTAGCGGTGGCGGTGCGACCGTT
GAGGATGTGGCGCTGATGCGTAAGACCGTTGGCGATCGTGCGGGTGTGAA
AGCGAGCGGCGGTGTTCGTGACTGGAAGACCGCGGAAGCGATGATCAACG
CGGGTGCGACCCGTATTGGTACCAGCAGCGGTGTTGCGATTGTGACCGGC
GGTACCGGTCGTGCGGATTATAAGCTT.

[0022] In some embodiments, the E. Coli pentose-phosphate aldolase is an amino acid sequence having at least 70% sequence identity, at least 80% sequence identity, or at least 90% sequence identity to:

(SEQ ID NO: 256)
MTDLKASSLRALKLMDLTTLNDDDTDEKVIALCHQAKTPVGNTAAICIYP
RFIPIARKTLKEQGTPEIRIATVTNFPHGNDDIDIALAETRAAIAYGADE
VDVVFPYRALMAGNEQVGFDLVKACKEACAAANVLLKVIIETGELKDEAL
IRKASEISIKAGADFIKTSTGKVAVNATPESARIMMEVIRDMGVEKTVGF
KPAGGVRTAEDAQKYLAIADELFGADWADARHYRFGASSLLASLLKALGH
GDGKSASSY.

[0023] In some embodiments, B. Caldolyticus pentose-phosphate aldolase is an amino acid sequence having at least 70% sequence identity, at least 80% sequence identity, or at least 90% sequence identity to:

(SEQ ID NO: 297)
MTMNIAKMIDHTLLKPEATEQQIVQLCTEAKQYGFAAVCVNPTWVKTAA
RELSGTDVRVCTVIGFPLGATTPETKAFETTNAIENGAREVDMVINIGAL
KSGQDELVERDIRAWEAAAGRALVKVIVETALLTDEEKVRACQLAVKAGA
DYVKTSTGFSGGGATVEDVALMRKTVGDRAGVKASGGVRDWKTAEAMINA
GATRIGTSSGVAIVTGGTGRADY

[0024] In some embodiments the B. Caldolyticus pentose-phosphate aldolase comprises a mutation C37N mutation and is encoded by a nucleic acid sequence having at least 70% sequence identity, at least 80% sequence identity, or at least 90% sequence identity to:

(SEQ ID NO: 286)
ATGACGATGAATATCGCGAAAATGATCGATCATACGCTGCTCAAACCGGA
AGCGACAGAACAACAAATCGTGCAACTGTGCACGGAAGCAAAGCAATACG
GCTTTGCTGCCGTGTGCGTCAACCCAACGTGGGTGAAAACGGCGGCGCGC
GAGCTTTCCGGCACGGATGTCCGCGTCTGCACGGTCATCGGCTTTCCACT
TGGGGCAACGACGCCGGAAACAAAGGCGTTTGAAACAACGAACGCCATCG
AAAACGGCGCTCGCGAAGTCGACATGGTGATCAACATCGGTGCGTTAAAA
AGCGGGCAAGACGAGCTTGTCGAGCGCGACATTCGTGCGGTTGTCGAAGC
GGCGGCTGGCAGGGCGCTTGTCAAAGTGATCGTTGAAACGGCGCTTTTGA
CCGATGAGGAAAAAGTGCGCGCCTGCCAGCTCGCAGTGAAAGCCGGCGCT
GATTATGTGAAAACGTCGACCGGGTTTTCCGGCGGAGGTGCGACGGTGGA
GGATGTGGCGCTGATGCGGAAAACGGTCGGCGACAGAGCAGGCGTCAAAG
CATCAGGCGGCGTCCGTGACTGGAAAACCGCTGAGGCGATGATCAACGCC
GGCGCGACGCGCATCGGCACAAGCTCTGGGGTCGCGATCGTCACCGGCGG
GACGGGCCGCGCTGACTACTAA.

[0025] In some embodiments, B. Caldolyticus pentose-phosphate aldolase comprises a mutation C37N mutation and is an amino acid sequence having at least 70% sequence identity, at least 80% sequence identity, or at least 90% sequence identity to:

(SEQ ID NO: 298)
MTMNIAKMIDHTLLKPEATEQQIVQLCTEAKQYGFAAVNVNPTWVKTAAR
ELSGTDVRVCTVIGFPLGATTPETKAFETTNAIENGAREVDMVINIGALK
SGQDELVERDIRAVVEAAAGRALVKVIVETALLTDEEKVRACQLAVKAGA
DYVKTSTGFSGGGATVEDVALMRKTVGDRAGVKASGGVRDWKTAEAMINA
GATRIGTSSGVAIVTGGTGRADY

[0026] In some embodiments, the recombinant microorganism comprises expression of at least one enzyme having transaldolase activity. In some embodiments, the enzyme having transaldolase activity is encoded by an amino acid sequence having at least 70% sequence identity, at least 80% sequence identity, or at least 90% sequence identity to talA or talB from E. coli. In some embodiments, the enzyme having transaldolase activity is talA from E. coli. In other embodiments, the enzyme having transaldolase activity is talB from E. coli. In another embodiment, the one or more nucleic acid molecules encoding the enzyme having transaldolase activity comprises an amino acid sequence selected from the group consisting of SEQ ID NOs: 152 and 154. In a further embodiment, the one or more nucleic acid molecule encoding the enzyme having transaldolase activity is encoded by a nucleic acid sequence selected from the group consisting of SEQ ID NOs: 151 and 153.

[0027] In some embodiments, the recombinant microorganism comprises expression of at least one enzyme having ribulose-5-phosphate 3-epimerase activity. In some embodiments, the enzyme having ribulose-5-phosphate 3-epimerase activity is encoded by an amino acid sequence having at least 70% sequence identity, at least 80% sequence identity, or at least 90% sequence identity to rpe from E. coli. In other embodiments, the enzyme having ribulose-5-phosphate 3-epimerase activity is rpe from E. coli. In another embodiment, the one or more nucleic acid molecules encoding the enzyme having ribulose-5-phosphate 3-epimerase activity comprise an amino acid sequence set forth in SEQ ID NO: 158. In a further embodiment, the one or more nucleic acid molecule encoding the enzyme having ribulose-5-phosphate 3-epimerase activity is encoded by a nucleic acid sequence set forth in SEQ ID NO: 157.

[0028] In some embodiments, the recombinant microorganism comprises expression of at least one enzyme having ribose-5-phosphate isomerase activity. In some embodiments, the enzyme having ribose-5-phosphate isomerase activity is encoded by an amino acid sequence having at least 70% sequence identity, at least 80% sequence identity, or at least 90% sequence identity to rpiA from E. coli. In other embodiments, the enzyme having ribose-5-phosphate isomerase activity is rpiA from E. coli. In other embodiments, the enzyme having ribose-5-phosphate isomerase activity is encoded by an amino acid sequence having at least 70% sequence identity, at least 80% sequence identity, or at least 90% sequence identity to rpiB from E. coli. In other embodiments, the enzyme having ribose-5-phosphate isomerase activity is rpiB from E. coli. In another embodiment, the one or more nucleic acid molecules encoding enzyme having ribose-5-phosphate isomerase activity comprise an amino acid sequence set forth in SEQ ID NO: 156. In a further embodiment, the one or more nucleic acid molecule encoding the enzyme having ribose-5-phosphate isomerase activity is encoded by a nucleic acid sequence set forth in SEQ ID NO: 155.

[0029] In some embodiments, the recombinant microorganism comprising expression of at least one enzyme having an activity selected from a transketolase activity, a transaldolase activity, a ribulose-5-phosphate 3-epimerase activity, a ribose-5-phosphate isomerase activity and a D-ribose-5-phosphate aldolase activity, further comprises a deleted or diminished activity one or more endogenous enzymes selected from glyceraldehyde 3-phosphate dehydrogenase, phophoglycerate kinase and phosphoglycerate mutase. In some embodiments, the endogenous glyceraldehyde 3-phosphate dehydrogenase enzyme is gapA, the phosphoglycerate kinase is pgk and the phosphoglycerate mutase is gpmA or gpmM.

[0030] In some embodiments, the recombinant microorganism comprises expression of at least one enzyme having fructose-6-phosphate phosphoketolase activity. In some embodiments, an enzyme having fructose-6-phosphate phosphoketolase activity is encoded by an amino acid sequence having at least 70% sequence identity, at least 80% sequence identity, or at least 90% sequence identity to an enzyme having fructose-6-phosphate phosphoketolase activity selected from the group consisting of Bifidobacterium dentium BDP_1006, Bifidobacterium lactis xfp, Lactobacillus paraplantarum xpkA and Bifidobacterium breve xfp. In a preferred embodiment, an enzyme having fructose-6-phosphate phosphoketolase activity is selected from the group consisting of Bifidobacterium dentium BDP_1006, Bifidobacterium lactis xfp, Lactobacillus paraplantarum xpkA and Bifidobacterium breve xfp. In another embodiment, the one or more nucleic acid molecules encoding the enzyme having fructose-6-phosphate phosphoketolase activity comprise an amino acid sequence selected from the group consisting of SEQ ID NOs: 212, 214, 216 and 218. In a further embodiment, the one or more nucleic acid molecule encoding the enzyme having fructose-6-phosphate phosphoketolase activity is encoded by a nucleic acid sequence selected from the group consisting of SEQ ID NOs: 211, 213, 215 and 217.

[0031] In some embodiments, the recombinant microorganism comprises expression of at least one enzyme having phosphate acetyltransferase activity. In some embodiments, an enzyme having phosphate acetyltransferase activity is encoded by an amino acid sequence having at least 70% sequence identity, at least 80% sequence identity, or at least 90% sequence identity to an enzyme having phosphate acetyltransferase activity selected from E. coli pta and Clostridium acetobutylicum pta. In a preferred embodiment, an enzyme having phosphate acetyltransferase activity is selected from E. coli pta and Clostridium acetobutylicum pta. In another embodiment, the one or more nucleic acid molecules encoding the enzyme having phosphate acetyltransferase activity comprise an amino acid sequence selected from SEQ ID NOs: 220 and 222. In a further embodiment, the one or more nucleic acid molecule encoding the enzyme having phosphate acetyltransferase activity is encoded by a nucleic acid sequence selected from SEQ ID NOs: 219 and 221.

[0032] In some embodiments, the recombinant microorganism comprising expression of at least one enzyme having an activity selected from a fructose-6-phosphate phosphoketolase activity, a phosphate acetyltransferase activity, a transketolase activity, a transaldolase activity, a ribulose-5-phosphate 3-epimerase activity, a ribose-5-phosphate isomerase activity and a D-ribose-5-phosphate aldolase activity, further comprises a deleted or diminished activity in an endogenous 6-phosphofructokinase enzyme. In some embodiments, the endogenous 6-phosphofructokinase enzyme is pfkA and/or pfkB.

[0033] In some embodiments, the one or more pentose and/or hexose sugars comprise D-xylose and the recombinant microorganism further comprises expression of at least one enzyme having xylose isomerase activity and expression of at least one enzyme having xylulose 5-kinase activity. In some embodiments, the at least one enzyme having xylose isomerase activity is encoded by an amino acid sequence having at least 70% sequence identity, at least 80% sequence identity, or at least 90% sequence identity to xylA from E. coli or Pyromyces sp. In a preferred embodiment, an enzyme having xylose isomerase activity is selected from E. coli xylA and Pyromyces sp xylA. In yet another embodiment, the one or more nucleic acid molecules encoding the xylose isomerase comprises an amino acid sequence selected from SEQ ID NOs: 95 and 144. In a further embodiment, the one or more nucleic acid molecules encoding the xylose isomerase is encoded by a nucleic acid sequence selected from the group consisting of SEQ ID NOs: 93, 94 and 143. In some embodiments, the at least one enzyme having xylulose 5-kinase activity is encoded by an amino acid sequence having at least 70% sequence identity, at least 80% sequence identity, or at least 90% sequence identity to xylB from E. coli. In a preferred embodiment, an enzyme having xylulose 5-kinase activity is E. coli xylB. In another embodiment, the one or more nucleic acid molecules encoding the D-xylulose 5-kinase comprises an amino acid sequence set forth in SEQ ID NO: 146. In a further embodiment, the one or more nucleic acid molecules encoding the D-xylulose 5-kinase is encoded by a nucleic acid sequence set forth in SEQ ID NO: 145.

[0034] In some embodiments, the one or more pentose and/or hexose sugars comprise D-fructose and the recombinant microorganism further comprises expression of at least one enzyme having fructose 1,6-bisphosphatase activity. In one embodiment, the at least one enzyme having fructose 1,6-bisphosphatase activity is encoded by an amino acid sequence having at least 70% sequence identity, at least 80% sequence identity, or at least 90% sequence identity to fbp from E. coli. In a preferred embodiment, an enzyme having fructose 1,6-bisphosphatase activity is E. coli fbp. In some embodiments, the enzyme having fructose 1,6-bisphosphatase activity converts D-fructose 1,6-bisphosphate to D-fructose 6-phosphate. In other embodiments, D-fructose is converted to fructose 1,6-bisphoshate by endogenous enzymes in the recombinant microorganism.

[0035] In some embodiments of any of the recombinant microorganisms described above, the recombinant microorganism further comprises a deleted or diminished activity in one or more endogenous enzymes selected from glucose 6-phosphate-1-dehydrogenase, 6-phosphogluconolactonase, and 6-phosphogluconate dehydrogenase. In further embodiments, the glucose 6-phosphate-1-dehydrogenase is zwf, the 6-phosphogluconolactonase is pgl, and the 6-phosphogluconate dehydrogenase is gnd.

[0036] In some embodiments, the one or more pentose and/or hexose sugars are capable of being converted to one or more intermediate in the non-oxidative pentose phosphate pathway of the recombinant microorganism. In other embodiments, the one or more pentose and/or hexose sugars are comprised of monomers, oligomers, or a combination thereof.

[0037] In some embodiments, the expression of at least one enzyme having transketolase activity and/or fructose-6-phosphate phosphoketolase activity and the expression of at least one enzyme having D-ribose 5-phosphate aldolase activity enables a lossless conversion of one or more pentose and/or hexose sugars to D-ribose-5-phosphate intermediate and the subsequent conversion of D-ribose-5-phosphate to G3P and glycolaldehyde.

[0038] In some embodiments, the recombinant microorganism produces MEG or glycolic acid (GA) through the conversion of of glycolaldehyde in a C2 pathway and through the conversion of G3P in one or more C3 pathways. In some embodiments, MEG is produced by the reduction of glycolaldehyde by an enzyme having glycolaldehyde reductase activity in a C2 pathway. In other embodiments, GA is produced by the oxidation of glycolaldehyde by an enzyme having glycolaldehyde dehydrogenase activity in a C2 pathway.

[0039] In some embodiments, the at least one enzyme for the production of MEG or GA are selected from at least one enzyme having an activity selected from a 3-phosphoglycerate dehydrogenase activity, a phosphoserine aminotransferase activity, a serine transaminase activity, a 3-phosphohydroxypyruvate phosphatase activity, a phosphoserine phosphatase activity, a hydroxypyruvate decarboxylase activity, a 3-phosphohydroxypyruvate reductase activity, a glycolaldehyde reductase activity, a glycolaldehyde dehydrogenase activity, a serine oxidoreductase (deaminating) or serine-pyruvate aminotransferase activity, a serine decarboxylase activity, an ethanolamine aminotransferase or ethanolamine oxidoreductase (deaminating) activity, a glycerate decarboxylase activity, a hydroxypyruvate reductase activity, a 3-phosphoglycerate phosphatase activity, a 2-phosphoglycerate phosphatase activity, a glycerate 3-kinase activity, a glycerate 2-kinase activity, and a glyoxylate reductase activity.

[0040] In some embodiments, the recombinant microorganism produces MEG through the conversion of glycolaldehyde in a C2 pathway and produces one or more co-product through the conversion of G3P in one or more C3 pathways. In other embodiments, the one or more co-product is selected from acetone, isopropanol, propene, isobutene and one or more serine pathway compounds. In some preferred embodiments, the one or more serine pathway compounds is selected from serine, glycine, monoethanolamine (MEA) and ethylenediamine (EDA).

[0041] In some embodiments, the at least one enzyme for the production of one or more co-product through the conversion of G3P in one or more C3 pathways are selected from at least one enzyme having an activity selected from a thiolase or acetyl coenzyme A acetyltransferase activity, an acetyl-CoA:acetoacetate transferase or acetate:acetoacetyl-CoA hydrolase activity, and an acetoacetate decarboxylase activity, and the one or more co-product comprises acetone.

[0042] In some embodiments, the at least one enzyme for the production of one or more co-product through the conversion of G3P in one or more C3 pathways are selected from at least one enzyme having an activity selected from a thiolase or acetyl coenzyme A acetyltransferase activity, an acetyl-CoA:acetoacetate transferase or acetate:acetoacetyl-CoA hydrolase activity, an acetoacetate decarboxylase activity, and a secondary alcohol dehydrogenase activity, and the one or more co-product comprises isopropanol.

[0043] In some embodiments, the at least one enzyme for the production of one or more co-product through the conversion of G3P in one or more C3 pathways are selected from at least one enzyme having an activity selected from a thiolase or acetyl coenzyme A acetyltransferase activity, an acetyl-CoA:acetoacetate transferase or acetate:acetoacetyl-CoA hydrolase activity, an acetoacetate decarboxylase activity, a secondary alcohol dehydrogenase activity, and a dehydratase activity, and the one or more co-product comprises propene.

[0044] In some embodiments, the at least one enzyme for the production of one or more co-product through the conversion of G3P in one or more C3 pathways are selected from at least one enzyme having an activity selected from a thiolase or acetyl coenzyme A acetyltransferase activity, an acetyl-CoA:acetoacetate transferase or acetate:acetoacetyl-CoA hydrolase activity, an acetoacetate decarboxylase activity, a 3-hydroxyisovalerate (3HIV) synthase activity, a hydroxymethylglutaryl-CoA synthase activity, a methylglutaconyl-CoA hydratase activity, a methylcrotonyl-CoA carboxylase activity, a methylcrotonyl-CoA hydratase activity, a 3-hydroxyisovaleryl-CoA thioesterase activity, a 3HIV kinase activity, a 3HIV-3-phosphate decarboxylase activity, and a 3HIV decarboxylase activity, and the one or more co-product comprises isobutene.

[0045] In some embodiments, the at least one enzyme for the production of one or more co-product through the conversion of G3P in one or more C3 pathways are selected from at least one enzyme having an activity selected from a 3-phosphoglycerate dehydrogenase activity, a phosphoserine aminotransferase activity, a 3-phosphohydroxypyruvate phosphatase activity, a phosphoserine phosphatase activity, a serine oxidoreductase (deaminating) or serine-pyruvate aminotransferase activity, a hydroxypyruvate reductase activity, a 3-phosphoglycerate phosphatase activity, a 2-phosphoglycerate phosphatase activity, a glycerate 3-kinase activity, and a glycerate 2-kinase activity, and the one or more co-product comprises L-serine.

[0046] In some embodiments, the at least one enzyme for the production of one or more co-product through the conversion of G3P in one or more C3 pathways are selected from at least one enzyme having an activity selected from a serine hydroxymethyltransferase activity, a transferase activity, a formaldehyde dehydrogenase activity, a formate dehydrogenase activity, an activity associated with glycine cleavage system, a 3-phosphoglycerate dehydrogenase activity, a phosphoserine aminotransferase activity, a 3-phosphohydroxypyruvate phosphatase activity, a phosphoserine phosphatase activity, a serine transaminase activity, a hydroxypyruvate decarboxylase activity, a serine oxidoreductase (deaminating) activity, a serine decarboxylase activity, an ethanolamine aminotransferase or ethanolamine oxidoreductase (deaminating) activity, a hydroxypyruvate reductase activity, a 3-phosphoglycerate phosphatase activity, a 2-phosphoglycerate phosphatase activity, a glycerate 3-kinase activity, a glycerate 2-kinase activity, a glycolaldehyde dehydrogenase activity, a glycolate dehydrogenase activity, an alanine-glyoxylate aminotransferase activity, an alanine transaminase activity, an NAD(P)H dependent glutamate dehydrogenase activity, and the one or more co-product comprises glycine. In another embodiment, the activity associated with glycine cleavage system comprise an enzyme or protein selected from a glycine decarboxylase (P protein), an aminomethyltransferase (T protein), a dihydrolipoamide dehydrogenase (L protein), and an H protein.

[0047] In some embodiments, the at least one enzyme for the production of one or more co-product through the conversion of G3P in one or more C3 pathways are selected from at least one enzyme having an activity selected from a 3-phosphoglycerate dehydrogenase activity, a 3-phosphoserine aminotransferase activity, a 3-phosphohydroxypyruvate phosphatase activity, a phosphoserine phosphatase activity, a transaminase activity, a hydroxypyruvate decarboxylase activity, a serine oxidoreductase (deaminating) or serine-pyruvate aminotransferase activity, a serine decarboxylase activity, a hydroxypyruvate reductase activity, a 3-phosphoglycerate phosphatase activity, a 2-phosphoglycerate phosphatase activity, a glycerate 3-kinase activity, a glycerate 2-kinase activity, an acetaldehyde dehydrogenase activity, and an ethanolamine ammonia lyase activity, and the one or more co-product comprises monoethanolamine (MEA).

[0048] In some embodiments, the at least one enzyme for the production of one or more co-product through the conversion of G3P in one or more C3 pathways are selected from at least one enzyme having an activity selected from a serine dehydrogenase activity, a 2-aminomalonate semialdehyde decarboxylase activity, an aminoacetaldehyde transaminase activity, a 2-aminomalonate semialdehyde transaminase activity, a 2,3-diaminopropanoate decarboxylase activity, a serine decarboxylase activity, an ethanolamine dehydrogenase activity, a serine hydroxymethyltransferase activity, an aldehyde oxidase activity, an N-acetyl transferase or O-acetyl transferase activity, an N-acetylserine dehydrogenase activity, a transaminase activity, a deacetylase activity, a serine aminase activity, and a 2,3-diaminopropanoate ammonia lyase activity, and the one or more co-product comprises ethylenediamine (EDA).

[0049] In some embodiments of any of the recombinant microorganisms described above, the recombinant microorganism further comprises one or more modifications to diminish or delete activity in a glycolaldehyde reductase, a glycolaldehyde dehydrogenase, a lactate dehydrogenase, or combination thereof.

[0050] In one embodiment, at least a portion of the excess NADH produced in the C3 pathway is used as a source of reducing equivalents in the C2 pathway. In another embodiment, at least a portion of the excess NADH produced in the C3 pathway is used to produce ATP.

[0051] In one embodiment, excess biomass formation is minimized and production MEG (or glycolic acid), or MEG (or GA) and one or more co-products is maximized.

[0052] In another aspect, the application provides for a method of producing one or more products derived from glyceraldehyde-3-phosphate (G3P) and glycolaldehyde using a recombinant microorganism of any of the above embodiments, wherein the method comprises cultivating the recombinant microorganism in a culture medium containing one or more pentose and/or hexose sugars providing a carbon source until the one or more products derived from glyceraldehyde-3-phosphate (G3P) and glycolaldehyde are produced. In some embodiments, the recombinant microorganism co-produces monoethylene glycol (MEG) and one or more co-products. In further embodiments, the one or more co-products are selected from acetone, isopropanol, propene, L-serine, glycine, monoethanolamine (MEA), ethylenediamine (EDA), or a combination thereof. In yet further embodiments, the one or more product is selected from monoethylene glycol (MEG) and glycolic acid (GA).

[0053] In yet another aspect, the application provides for a method of producing a recombinant microorganism that produces or accumulates one or more products derived from glyceraldehyde-3-phosphate (G3P) and glycolaldehyde from one or more pentose and/or hexose sugars via a D-ribose-5-phosphate intermediate, comprising: introducing into or expressing in the recombinant microorganism one or more enzyme for the conversion of the one or more pentose and/or hexose sugars to the D-ribose-5-phosphate intermediate; introducing into or expressing in the recombinant microorganism one or more enzyme for the conversion of the D-ribose-5-phosphate intermediate to G3P and glycolaldehyde; introducing into or expressing in the recombinant microorganism one or more enzyme for the production of the one or more products from glycolaldehyde in a C2 pathway; and introducing into or expressing in the recombinant microorganism one or more enzymes for the production of the one or more products from G3P in one or more C3 pathways; and culturing the recombinant microorganism in a culture medium containing the one or more pentose and/or hexose sugars to produce or accumulate the one or more products. In some embodiments, the recombinant microorganism co-produces monoethylene glycol (MEG) and one or more co-products. In further embodiments, the one or more co-products are selected from acetone, isopropanol, propene, L-serine, glycine, monoethanolamine (MEA), ethylenediamine (EDA), or a combination thereof. In yet further embodiments, the one or more product is selected from monoethylene glycol (MEG) and glycolic acid (GA).

### BRIEF DESCRIPTION OF DRAWINGS

[0054] Illustrative embodiments of the disclosure are illustrated in the drawings, in which:

[0055] FIG. 1 illustrates a degradation pathway for pentoses or hexoses. The symbol [symbol] means enzymes to be potentially down regulated or inactivated/abolished, ie. respective gene potentially attenuated or deleted.

[0056] FIG. 2 illustrates a variation of a degradation pathway for pentoses or hexoses that comprise fructose-6-phosphate phosphoketolase (Fpk) and phosphate acetyltransferase (pta). The symbol [symbol] means enzymes to be potentially down regulated or inactivated/abolished, ie. respective gene potentially attenuated or deleted.

[0057] FIG. 3 illustrates lossless transformation of various sugars to glycolaldehyde and glyceraldehyde 3-phosphate.

[0058] FIG. 4 illustrates high yield MEG and possible co-production pathways via pentose-phosphate (D-ribose 5-phosphate, D-ribulose 5-phosphate and D-xylulose 5-phosphate).

[0059] FIG. 5 illustrates high yield glycolic acid pathways via pentose-phosphate (D-ribose 5-phosphate, D-ribulose 5-phosphate and D-xylulose 5-phosphate).

[0060] FIG. 6 illustrates an overview of the MEG and Ser, Gly, MEA, EDA co-production pathways.

[0061] FIG. 7 illustrates published EDA production pathways. From WO 2014/049382. Reaction F: direct L-serine amination via L-serine aminase. Reaction G: direct pyruvate amination via 2,3-diaminopropionate ammonia lyase.

[0062] FIG. 8 is a depiction of the alignment of DERA from E. Coli and B. caldolyticus with mutations highlighted.

[0063] FIG. 9 is a scheme showing the reaction of an assay for measuring pentose kinase activity.

[0064] FIG. 10 is a plot of a Michaelis-Menten curve of a recombinant rbsK enzyme on a pentose substrate. The initial rate is plotted as a function of the substrate concentration.

[0065] FIG. 11 is a plot of a Michaelis-Menten curve of a recombinant xylulokinase enzyme on a pentose substrate. The initial rate is plotted as a function of the substrate concentration.

[0066] FIG. 12 is a plot of a Michaelis-Menten curve of a recombinant AraB enzyme on a pentose substrate. The initial rate is plotted as a function of the substrate concentration.

[0067] FIG. 13 is a scheme showing the reaction of an assay for measuring recombinant DERA activity using the natural substrate, 2-deoxy-robose-5P.

[0068] FIG. 14 is a scheme showing the reaction of an assay for measuring recombinant DERA activity from a pentose substrate.

[0069] FIG. 15 is a plot of a Michaelis-Menten curve of a commercially available E. Coli-derived DERA enzyme using the natural substrate, deoxy-ribose-5P. The initial rate is plotted as a function of the substrate concentration.

[0070] FIG. 16 is a plot of a Michaelis-Menten curve of a recombinant E. Coli-derived wild-type DERA enzyme using the natural substrate, deoxy-ribose-5P. The initial rate is plotted as a function of the substrate concentration.

[0071] FIG. 17 is a plot of a Michaelis-Menten curve of a recombinant B. caldolyticus-derived wild-type DERA enzyme using the natural substrate, deoxy-ribose-5P. The initial rate is plotted as a function of the substrate concentration.

[0072] FIG. 18 is a plot of a Michaelis-Menten curve of a recombinant E. Coli-derived C47N mutated DERA enzyme variant using the natural substrate, deoxy-ribose-5P. The initial rate is plotted as a function of the substrate concentration.

[0073] FIG. 19 is a plot of a Michaelis-Menten curve of a recombinant E. Coli-derived C47N mutated DERA enzyme variant using the natural substrate, deoxy-ribose-5P. The initial rate is plotted as a function of the substrate concentration.

[0074] FIG. 20 is a plot of a Michaelis-Menten curve of a recombinant E. Coli-derived K201N mutated DERA enzyme variant using the natural substrate, deoxy-ribose-5P. The initial rate is plotted as a function of the substrate concentration.

[0075] FIG. 21 is a scheme showing the reaction of an assay for measuring aldA activity using a glycoaldehyde substrate.

[0076] FIG. 22 is a plot of a Michaelis-Menten curve of aldA using glycoaldehyde as a substrate. The initial rate is plotted as a function of the substrate concentration.

[0077] FIG. 23 is a scheme showing the reaction of an assay for measuring glycolate production from a pentose.

[0078] FIG. 24 is a scheme of DERA activity using a MG1655-ΔtktA-ΔtktB strain expressing DERA protein and growing on xylose.

[0079] FIG. 25 is a plot of growth curves of E. Coli strains growing on xylose minimum media.

### DETAILED DESCRIPTION

### Definitions

[0080] The following definitions and abbreviations are to be used for the interpretation of the disclosure.

[0081] As used herein and in the appended claims, the singular forms “a,” “an,” and “the” include plural referents unless the context clearly dictates otherwise. Thus, for example, reference to “an enzyme” includes a plurality of such enzymes and reference to “the microorganism” includes reference to one or more microorganisms, and so forth.

[0082] As used herein, the terms “comprises,” “comprising,” “includes,” “including,” “has,” “having, “contains,” “containing,” or any other variation thereof, are intended to cover a non-exclusive inclusion. A composition, mixture, process, method, article, or apparatus that comprises a list of elements is not necessarily limited to only those elements but may include other elements not expressly listed or inherent to such composition, mixture, process, method, article, or apparatus. Further, unless expressly stated to the contrary, “or” refers to an inclusive “or” and not to an exclusive “or.”

[0083] The terms “about” and “around,” as used herein to modify a numerical value, indicate a close range surrounding that explicit value. If “X” were the value, “about X” or “around X” would indicate a value from 0.9X to 1.1X, or, in some embodiments, a value from 0.95X to 1.05X. Any reference to “about X” or “around X” specifically indicates at least the values X, 0.95X, 0.96X, 0.97X, 0.98X, 0.99X, 1.01X, 1.02X, 1.03X, 1.04X, and 1.05X. Thus, “about X” and “around X” are intended to teach and provide written description support for a claim limitation of, e.g., “0.98X.”

[0084] As used herein, the terms “microbial,” “microbial organism,” and “microorganism” include any organism that exists as a microscopic cell that is included within the domains of archaea, bacteria or eukarya, the latter including yeast and filamentous fungi, protozoa, algae, or higher Protista. Therefore, the term is intended to encompass prokaryotic or eukaryotic cells or organisms having a microscopic size and includes bacteria, archaea, and eubacteria of all species as well as eukaryotic microorganisms such as yeast and fungi. Also included are cell cultures of any species that can be cultured for the production of a chemical.

[0085] As described herein, in some embodiments, the recombinant microorganisms are prokaryotic microorganism. In some embodiments, the prokaryotic microorganisms are bacteria. “Bacteria”, or “eubacteria”, refers to a domain of prokaryotic organisms. Bacteria include at least eleven distinct groups as follows: (1) Gram-positive (gram+) bacteria, of which there are two major subdivisions: (1) high G+C group (Actinomycetes, Mycobacteria, Micrococcus, others) (2) low G+C group (Bacillus, Clostridia, Lactobacillus, Staphylococci, Streptococci, Mycoplasmas); (2) Proteobacteria, e.g., Purple photosynthetic+non-photosynthetic Gram-negative bacteria (includes most “common” Gram-negative bacteria); (3) Cyanobacteria, e.g., oxygenic phototrophs; (4) Spirochetes and related species; (5) Planctomyces; (6) Bacteroides, Flavobacteria; (7) Chlamydia; (8) Green sulfur bacteria; (9) Green non-sulfur bacteria (also anaerobic phototrophs); (10) Radioresistant micrococci and relatives; (11) Thermotoga and Thermosipho thermophiles.

[0086] “Gram-negative bacteria” include cocci, nonenteric rods, and enteric rods. The genera of Gram-negative bacteria include, for example, Neisseria, Spirillum, Pasteurella, Brucella, Yersinia, Francisella, Haemophilus, Bordetella, Escherichia, Salmonella, Shigella, Klebsiella, Proteus, Vibrio, Pseudomonas, Bacteroides, Acetobacter, Aerobacter, Agrobacterium, Azotobacter, Spirilla, Serratia, Vibrio, Rhizobium, Chlamydia, Rickettsia, Treponema, and Fusobacterium.

[0087] “Gram positive bacteria” include cocci, nonsporulating rods, and sporulating rods. The genera of gram positive bacteria include, for example, Actinomyces, Bacillus, Clostridium, Corynebacterium, Erysipelothrix, Lactobacillus, Listeria, Mycobacterium, Myxococcus, Nocardia, Staphylococcus, Streptococcus, and Streptomyces.

[0088] The term “recombinant microorganism” and “recombinant host cell” are used interchangeably herein and refer to microorganisms that have been genetically modified to express or to overexpress endogenous enzymes, to express heterologous enzymes, such as those included in a vector, in an integration construct, or which have an alteration in expression of an endogenous gene. By “alteration” it is meant that the expression of the gene, or level of a RNA molecule or equivalent RNA molecules encoding one or more polypeptides or polypeptide subunits, or activity of one or more polypeptides or polypeptide subunits is up regulated or down regulated, such that expression, level, or activity is greater than or less than that observed in the absence of the alteration. For example, the term “alter” can mean “inhibit,” but the use of the word “alter” is not limited to this definition. It is understood that the terms “recombinant microorganism” and “recombinant host cell” refer not only to the particular recombinant microorganism but to the progeny or potential progeny of such a microorganism. Because certain modifications may occur in succeeding generations due to either mutation or environmental influences, such progeny may not, in fact, be identical to the parent cell, but are still included within the scope of the term as used herein.

[0089] The term “expression” with respect to a gene sequence refers to transcription of the gene and, as appropriate, translation of the resulting mRNA transcript to a protein. Thus, as will be clear from the context, expression of a protein results from transcription and translation of the open reading frame sequence. The level of expression of a desired product in a host cell may be determined on the basis of either the amount of corresponding mRNA that is present in the cell, or the amount of the desired product encoded by the selected sequence. For example, mRNA transcribed from a selected sequence can be quantitated by qRT-PCR or by Northern hybridization (see Sambrook et al., Molecular Cloning: A Laboratory Manual, Cold Spring Harbor Laboratory Press (1989)). Protein encoded by a selected sequence can be quantitated by various methods, e.g., by ELISA, by assaying for the biological activity of the protein, or by employing assays that are independent of such activity, such as western blotting or radioimmunoassay, using antibodies that recognize and bind the protein. See Sambrook et al., 1989, supra.

[0090] The term “polynucleotide” is used herein interchangeably with the term “nucleic acid” and refers to an organic polymer composed of two or more monomers including nucleotides, nucleosides or analogs thereof, including but not limited to single stranded or double stranded, sense or antisense deoxyribonucleic acid (DNA) of any length and, where appropriate, single stranded or double stranded, sense or antisense ribonucleic acid (RNA) of any length, including siRNA. The term “nucleotide” refers to any of several compounds that consist of a ribose or deoxyribose sugar joined to a purine or a pyrimidine base and to a phosphate group, and that are the basic structural units of nucleic acids. The term “nucleoside” refers to a compound (as guanosine or adenosine) that consists of a purine or pyrimidine base combined with deoxyribose or ribose and is found especially in nucleic acids. The term “nucleotide analog” or “nucleoside analog” refers, respectively, to a nucleotide or nucleoside in which one or more individual atoms have been replaced with a different atom or with a different functional group. Accordingly, the term polynucleotide includes nucleic acids of any length, DNA, RNA, analogs and fragments thereof. A polynucleotide of three or more nucleotides is also called nucleotidic oligomer or oligonucleotide.

[0091] It is understood that the polynucleotides described herein include “genes” and that the nucleic acid molecules described herein include “vectors” or “plasmids.” Accordingly, the term “gene”, also called a “structural gene” refers to a polynucleotide that codes for a particular sequence of amino acids, which comprise all or part of one or more proteins or enzymes, and may include regulatory (non-transcribed) DNA sequences, such as promoter sequences, which determine for example the conditions under which the gene is expressed. The transcribed region of the gene may include untranslated regions, including introns, 5′-untranslated region (UTR), and 3′-UTR, as well as the coding sequence.

[0092] The term “enzyme” as used herein refers to any substance that catalyzes or promotes one or more chemical or biochemical reactions, which usually includes enzymes totally or partially composed of a polypeptide or polypeptides, but can include enzymes composed of a different molecule including polynucleotides.

[0093] As used herein, the term “non-naturally occurring,” when used in reference to a microorganism organism or enzyme activity of the disclosure, is intended to mean that the microorganism organism or enzyme has at least one genetic alteration not normally found in a naturally occurring strain of the referenced species, including wild-type strains of the referenced species. Genetic alterations include, for example, modifications introducing expressible nucleic acids encoding metabolic polypeptides, other nucleic acid additions, nucleic acid deletions and/or other functional disruption of the microorganism's genetic material. Such modifications include, for example, coding regions and functional fragments thereof, for heterologous, homologous, or both heterologous and homologous polypeptides for the referenced species. Additional modifications include, for example, non-coding regulatory regions in which the modifications alter expression of a gene or operon. Exemplary non-naturally occurring microorganism or enzyme activity includes the hydroxylation activity described above.

[0094] The term “exogenous” as used herein with reference to various molecules, e.g., polynucleotides, polypeptides, enzymes, etc., refers to molecules that are not normally or naturally found in and/or produced by a given yeast, bacterium, organism, microorganism, or cell in nature.

[0095] On the other hand, the term “endogenous” or “native” as used herein with reference to various molecules, e.g., polynucleotides, polypeptides, enzymes, etc., refers to molecules that are normally or naturally found in and/or produced by a given yeast, bacterium, organism, microorganism, or cell in nature.

[0096] The term “heterologous” as used herein in the context of a modified host cell refers to various molecules, e.g., polynucleotides, polypeptides, enzymes, etc., wherein at least one of the following is true: (a) the molecule(s) is/are foreign (“exogenous”) to (i.e., not naturally found in) the host cell; (b) the molecule(s) is/are naturally found in (e.g., is “endogenous to”) a given host microorganism or host cell but is either produced in an unnatural location or in an unnatural amount in the cell; and/or (c) the molecule(s) differ(s) in nucleotide or amino acid sequence from the endogenous nucleotide or amino acid sequence(s) such that the molecule differing in nucleotide or amino acid sequence from the endogenous nucleotide or amino acid as found endogenously is produced in an unnatural (e.g., greater than naturally found) amount in the cell.

[0097] The term “homolog,” as used herein with respect to an original enzyme or gene of a first family or species, refers to distinct enzymes or genes of a second family or species which are determined by functional, structural, or genomic analyses to be an enzyme or gene of the second family or species which corresponds to the original enzyme or gene of the first family or species. Homologs most often have functional, structural, or genomic similarities. Techniques are known by which homologs of an enzyme or gene can readily be cloned using genetic probes and PCR. Identity of cloned sequences as homologs can be confirmed using functional assays and/or by genomic mapping of the genes.

[0098] A protein has “homology” or is “homologous” to a second protein if the amino acid sequence encoded by a gene has a similar amino acid sequence to that of the second gene. Alternatively, a protein has homology to a second protein if the two proteins have “similar” amino acid sequences. Thus, the term “homologous proteins” is intended to mean that the two proteins have similar amino acid sequences. In certain instances, the homology between two proteins is indicative of its shared ancestry, related by evolution. The terms “homologous sequences” or “homologs” are thought, believed, or known to be functionally related. A functional relationship may be indicated in any one of a number of ways, including, but not limited to: (a) degree of sequence identity and/or (b) the same or similar biological function. Preferably, both (a) and (b) are indicated. The degree of sequence identity may vary, but in one embodiment, is at least 50% (when using standard sequence alignment programs known in the art), at least 60%, at least 65%, at least 70%, at least 75%, at least 80%, at least 85%, at least 90%, at least about 91%, at least about 92%, at least about 93%, at least about 94%, at least about 95%, at least about 96%, at least about 97%, at least about 98%, or at least 98.5%, or at least about 99%, or at least 99.5%, or at least 99.8%, or at least 99.9%. Homology can be determined using software programs readily available in the art, such as those discussed in Current Protocols in Molecular Biology (F. M. Ausubel et al., eds., 1987) Supplement 30, section 7.718, Table 7.71. Some alignment programs are MacVector (Oxford Molecular Ltd, Oxford, U.K.) and ALIGN Plus (Scientific and Educational Software, Pennsylvania). Other non-limiting alignment programs include Sequencher (Gene Codes, Ann Arbor, Mich.), AlignX, and Vector NTI (Invitrogen, Carlsbad, Calif.). A similar biological function may include, but is not limited to: catalyzing the same or similar enzymatic reaction; having the same or similar selectivity for a substrate or co-factor; having the same or similar stability; having the same or similar tolerance to various fermentation conditions (temperature, pH, etc.); and/or having the same or similar tolerance to various metabolic substrates, products, by-products, intermediates, etc. The degree of similarity in biological function may vary, but in one embodiment, is at least 1%, at least 2%, at least 3%, at least 4%, at least 5%, at least 6%, at least 7%, at least 8%, at least 9%, at least 10%, at least 20%, at least 30%, at least 40%, at least 50%, at least 60%, at least 65%, at least 70%, at least 75%, at least 80%, at least 85%, at least 90%, at least about 91%, at least about 92%, at least about 93%, at least about 94%, at least about 95%, at least about 96%, at least about 97%, at least about 98%, or at least 98.5%, or at least about 99%, or at least 99.5%, or at least 99.8%, or at least 99.9%, according to one or more assays known to one skilled in the art to determine a given biological function.

[0099] The term “variant” refers to any polypeptide or enzyme described herein. A variant also encompasses one or more components of a multimer, multimers comprising an individual component, multimers comprising multiples of an individual component (e.g., multimers of a reference molecule), a chemical breakdown product, and a biological breakdown product. In particular, non-limiting embodiments, an enzyme may be a “variant” relative to a reference enzyme by virtue of alteration(s) in any part of the polypeptide sequence encoding the reference enzyme. A variant of a reference enzyme can have enzyme activity of at least 10%, at least 30%, at least 50%, at least 80%, at least 90%, at least 100%, at least 105%, at least 110%, at least 120%, at least 130% or more in a standard assay used to measure enzyme activity of a preparation of the reference enzyme. In some embodiments, a variant may also refer to polypeptides having at least 50%, at least 60%, at least 70%, at least 80%, at least 90%, at least 91%, at least 92%, at least 93%, at least 94%, at least 95%, at least 96%, at least 97%, at least 98%, or at least 99% sequence identity to the full-length, or unprocessed enzymes of the present disclosure. In some embodiments, a variant may also refer to polypeptides having at least 50%, at least 60%, at least 70%, at least 80%, at least 90%, at least 91%, at least 92%, at least 93%, at least 94%, at least 95%, at least 96%, at least 97%, at least 98%, or at least 99% sequence identity to the mature, or processed enzymes of the present disclosure.

[0100] The term “signal sequence” as used herein refers to an amino acid sequence that targets peptides and polypeptides to cellular locations or to the extracellular environment. Signal sequences are typically at the N-terminal portion of a polypeptide and are typically removed enzymatically. Polypeptides that have their signal sequences are referred to as being full-length and/or unprocessed. Polypeptides that have had their signal sequences removed are referred to as being mature and/or processed.

[0101] The term “yield potential” as used herein refers to a yield of a product from a biosynthetic pathway. In one embodiment, the yield potential may be expressed as a percent by weight of end product per weight of starting compound.

[0102] The term “thermodynamic maximum yield” as used herein refers to the maximum yield of a product obtained from fermentation of a given feedstock, such as glucose, based on the energetic value of the product compared to the feedstock. In a normal fermentation, without use of additional energy sources such as light, hydrogen gas or methane or electricity, for instance, the product cannot contain more energy than the feedstock. The thermodynamic maximum yield signifies a product yield at which all energy and mass from the feedstock is converted to the product. This yield can be calculated and is independent of a specific pathway. If a specific pathway towards a product has a lower yield than the thermodynamic maximum yield, then it loses mass and can most likely be improved upon or substituted with a more efficient pathway towards the product.

[0103] The term “redox balanced” refers to a set of reactions, which taken together produce as much redox cofactors as they consume. Designing metabolic pathways and engineering an organism such that the redox cofactors are balanced or close to being balanced usually results in a more efficient, higher yield production of the desired compounds. Redox reactions always occur together as two half-reactions happening simultaneously, one being an oxidation reaction and the other a reduction reaction. In redox processes, the reductant transfers electrons to the oxidant. Thus, in the reaction, the reductant or reducing agent loses electrons and is oxidized, and the oxidant or oxidizing agent gains electrons and is reduced. In one embodiment, the redox reactions take place in a biological system. Biological energy is frequently stored and released by means of redox reactions. Photosynthesis involves the reduction of carbon dioxide into sugars and the oxidation of water into molecular oxygen. The reverse reaction, respiration, oxidizes sugars to produce carbon dioxide and water. As intermediate steps, the reduced carbon compounds are used to reduce nicotinamide adenine dinucleotide (NAD+), which then contributes to the creation of a proton gradient, which drives the synthesis of adenosine triphosphate (ATP) and is maintained by the reduction of oxygen. The term redox state is often used to describe the balance of GSH/GSSG, NAD+/NADH and NADP+/NADPH in a biological system such as a cell or organ. The redox state is reflected in the balance of several sets of metabolites (e.g., lactate and pyruvate, beta-hydroxybutyrate, and acetoacetate), whose interconversion is dependent on these ratios. An abnormal redox state can develop in a variety of deleterious situations, such as hypoxia, shock, and sepsis.

[0104] The terms “C2 pathway”, “C2 branch pathway”, “C2 biochemical pathway” or “C2 stream” as used herein refers to a biochemical pathway wherein MEG can be produced via glycolaldehyde.

[0105] The terms “C3 pathway”, “C3 branch pathway”, “C3 biochemical pathway” or “C3 stream” as used herein refers to a biochemical pathway wherein MEG and/or one or more co-product such as acetone, isopropanol, propene, isobutene and/or serine pathway compounds can be produced via pyruvate, acetyl-CoA or dihydroxyacetonephosphate (DHAP).

[0106] The terms “C5 sugars” and “pentose sugars” are used interchangeably and refer to sugar molecules comprised of 5 carbon atoms. Similarly, the terms “C6 sugars” and “hexose sugars” are used interchangeably and refer to sugar molecules comprised of 6 carbon atoms. The sugars can be monomers, oligomers, or a combination thereof. In a further exemplary embodiment, the sugar is glucose or oligomers of glucose thereof. In other embodiments, the oligomers of glucose are selected from fructose, sucrose, starch, cellobiose, maltose, lactose and cellulose. In yet further embodiments, the sugars comprise D-xylose, D-galactose, D-mannose, D-arabinose, L-arabinose, D-fructose, or a combination thereof.

### INTRODUCTION

[0107] This disclosure allows accessing the broadly usable key intermediates glyceraldehyde-3-phosphate (G3P) and glycolaldehyde, without carbon loss, from a variety of C5 (pentose) and C6 (hexose) sugars, relying mainly on natural, proven reactions, by introducing just one new reaction catalyzed by a pentose-phosphate aldolase. In some embodiments, hexoses may be selected from D-allose, D-altrose, D-glucose, D-mannose, D-gulose, D-idose, D-galactose, D-talose, D-tagtose, D-sorbose, D-fructose, D-psicose, and other hexoses known in the art. In some embodiments, pentoses may be selected from D-xylose, D-ribose, D-arabinose, D-lyxose, D-xylulose, D-ribulose, and other pentoses known in the art. In some embodiments, the hexoses and pentoses may be selected from the levorotary or dextrorotary entatiomer of any of the hexoses and pentoses disclosed herein.

[0108] The described enzyme reactions of the disclosure allow, for instance, for high yield MEG (or glycolic acid), or MEG (or GA) and co-products production from glucose, xylose or various other sugars than can enter into the pentose phosphate pathway or a variety of sugar oligomers which can be readily broken down to the aforementioned monomers, or a mixture of those.

[0109] Compared to other glucose based MEG (or glycolic acid) production methods, the present methods solve or reduce the following problems: ATP shortage; large NADH excess; low overall product yield potential. Compared to other glucose based MEG or glycolic acid production methods, the present methods further allow utilization of D-glucose, D-xylose, and/or various other sugars or mixtures with the same high yield.

[0110] Compared to other D-xylose based MEG (or glycolic acid) production methods, as well as other D-xylose based MEG and co-product production methods, the present methods solve the following challenges and problems: a process depending on xylose (availability/market limitations, high price or low purity, slower and less efficient uptake than D-glucose); glucose induced inhibition of D-xylose utilization. Compared to other D-xylose based MEG (or glycolic acid) production methods, as well as other D-xylose based MEG and co-product production methods, the present methods further allow utilization of D-glucose, D-xylose, and/or various other sugars or mixtures with the same high yield.

[0111] All currently known MEG (or glycolic acid) production methods using glucose as feedstock have low yield potential. This is an intrinsic drawback of the biochemistry of how glucose is degraded to MEG, with one decarboxylation occurring per produced MEG (or glycolic acid) molecule for all the proposed and known pathways. However, one decarboxylation per MEG is too much to achieve redox-neutral and therefore optimal yield.

[0112] This disclosure describes an entirely new way of pentose or hexose degradation via the pentose phosphate pathway and/or its key pentose-phosphate interediates, including D-ribose-5-phosphate, D-ribulose-5-phosphate and D-xylulose-5-phosphate, by establishing a so far undescribed pentose-phosphate aldolase reaction, wherein the aldolase hase D-ribose-5-phosphate aldolase activity, D-ribulose-5-phosphate aldolase activity or D-xylulose-5-phosphate aldolase activity, producing the key precursors glycoladehyde and glyceraldehyde 3-phosphate (G3P) (FIG. 1). Depending on the entry into the pentose phosphate pathway, this conversion is achieved without losing carbon, even from hexoses. This disclosure thus allows for the hexose and/or pentose based production of various G3P or glycolaldehyde derivatives with high yield.

[0113] Utilization of a Non-Oxidative Entry into Pentose Phosphate Pathway

[0114] This technology can be used with a lossless transformation of glucose to a pentose-phosphate intermediate via the non-oxidative pentose phosphate pathway. Wherein the pentose-phosphate intermediate comprise D-ribose-5-phosphate, D-ribulose-5-phosphate or D-xylulose-5-phosphate. A transketolase, such as encoded by tktA or tktB from E. coli, is used as a non-oxidative entry into the pentose phosphate pathway to transform the glycolysis intermediates D-fructose 6-phosphate and D-glyceraldehyde 3-phosphate into D-xylulose 5-phosphate and D-erythrose 4-phosphate. D-erythrose 4-phosphate and another D-fructose 6-phosphate are further processed by a transaldolase (such as talA or talB from E. coli) and then by a transketolase to D-ribose 5-phosphate and D-xylulose 5-phosphate. The D-xylulose 5-phosphate molecules can be readily transformed into D-ribose 5-phosphate by D-ribulose 5-phosphate 3-epimerase (rpe) and D-ribose 5-phosphate isomerase (rpi) (FIG. 1).

[0115] The final equation is:

2.5D-glucose+2.5ATP+0.5phosphate→3D-ribose 5-phosphate+2.5ADP

[0116] If D-xylose is used as carbon source, a simple isomerization (xylA in E. coli) and activation (xylB in E. coli, xylulose 5-kinase) generates D-xylulose 5-phosphate, which through rpe and rpi action can be transformed into D-ribose 5-phosphate. This is already the natural route of xylose utilization in many organisms such as E. coli.

[0117] The final equation is:

2D-xylose+2ATP→2D-ribose 5-phosphate+2ADP

[0118] Optimization of Flux Towards Non-Oxidative Entry into Pentose Phosphate Path Way

[0119] To avoid the loss of one carbon, the oxidative entry into the pentose phosphate pathway via 6-phospho D-glucono-1,5-lactone and oxidative decarboxylation to D-ribulose 5-phosphate, the common pathway in E. coli, should not be utilized. It is advantageous to inhibit at least one or more of the appropriate reactions, namely glucose 6-phosphate 1-dehydrogenase, 6-phosphogluconolactonase, and 6-phosphogluconate dehydrogenase, by deleting or repressing one or more of the genes responsible (in E. coli: zwf, pgl, gnd).

[0120] Utilization of Alternative, Non-Oxidative Entry into Pentose Phosphate Pathway

[0121] Alternatively, a specific D-fructose 6-phosphate phosphoketolase (Fpk) and a phosphate acetyltransferase (PTA) can be used as lossless entry into the pentose phosphate pathway, making one D-erythrose 4-phosphate and one acetyl-CoA from D-fructose 6-phosphate. D-Erythrose 4-phosphate and a further D-fructose 6-phosphate are processed to two D-ribose 5-phosphates, as described above (FIG. 2).

[0122] The final equation is:

2D-glucose+2ATP+1CoA→2D-ribose 5-phosphate+1acetyl-CoA+2ADP

[0123] Downregulation of Glycolysis Downstream Reactions

[0124] The upper part of glycolysis is needed to transform 2.5 D-glucose or D-fructose into the key intermediates 2×D-fructose 6-phosphate and 1×D-glyceraldehyde 3-phosphate. To reduce or eliminate further flux through the lower part of glycolysis, i.e. the oxidative phosphorylation of D-glyceraldehyde 3-phosphate to 1,3-bisphospho D-glycerate and its subsequent conversion to 3-phospho-D-glycerate and 2-phospho-D-glycerate, activity of D-glyceraldehyde 3-phosphate dehydrogenase, phosphoglycerate kinase and phosphoglycerate mutase, encoded by gapA, pgk and gpmA/gpmM, respectively, in E. coli, can be diminished.

[0125] If the alternative entry into the pentose phosphate pathway via Fpk is utilized, then no D-glyceraldehyde 3-phosphate is needed and the appropriate 6-phosphofructokinase activity can be diminished or deleted (genes pfkA and/or pfkB in E. coli).

[0126] Utilization of Further Sugars

[0127] If an organism has or was endowed with the ability to consume starch or sucrose or cellulose or maltose, or oligomers of C5 or C6 sugars like glucose or xylose, for instance via expression of a sucrose invertase or cellobiose importer and cellobiose hydrolase, or any other sugar that can be degraded via the pentose phosphate pathway, it can generate the key intermediate of this disclosure, D-ribose 5-phosphate, thus enabling it to utilize the compositions and methods of the present disclosure in the same way and to the same extent, yielding the same benefits. For instance, L- or D-arabinose can both be naturally processed in E. coli, without carbon loss, via known degradation pathways, into the pentose phosphate pathway intermediates D-xylulose 5-phosphate or D-ribulose 5-phosphate, respectively (FIG. 3). These can then be readily converted into D-ribose 5-phosphate via rpe and rpi mediated activity. Also D-mannose or D-galactose are naturally, for instance in E. coli, degraded into the pentose phosphate pathway entry molecule D-fructose 6-phosphate.

[0128] D-fructose, in E. coli, is not degraded via D-fructose 6-phosphate, but rather via D-fructose 1-phosphate and D-fructose 1,6-bisphosphate. However, a simple overexpression of the intrinsic fructose 1,6-bisphosphatase would lead to D-fructose 6-phosphate and therefore enable utilization of this invention with D-fructose, or D-fructose yielding oligomers like sucrose.

[0129] Possible Utilization of the Reaction Products

[0130] G3P is an early key intermediate of glycolysis, and thus can be used for the synthesis of the majority of chemicals which can be derived from glucose, such as, but not limited to, acetone, 2-propanol, propene, isobutene, monoethylene glycol (MEG), glycolic acid (GA) and serine pathway compounds. Serine pathway compounds can include L-serine, glycine, monoethanolamine (MEA) and ethylenediamine (EDA). Glycolaldehyde can be readily converted to MEG via reduction or GA via oxidation (FIG. 4 and FIG. 5).

[0131] Most organisms can also naturally oxidize glycolaldehyde to glyoxylic acid and further convert it into the common intermediates oxaloacetate, malate, or 2-phosphoglycerate (via tartronate semialdehyde). These intermediates can be turned into biomass or a variety of chemical compounds. If these reactions should be avoided, for instance to improve MEG production, they can be diminished or eliminated by reducing or deleting activity of the appropriate genes.

[0132] High Yield Production of MEG

[0133] This technology allows a new, advantageous, high yield pathway for the production of MEG from glucose or xylose, or even mixtures of both sugars utilizing the same core degradation pathway (FIG. 4).

[0134] If glucose is utilized for MEG production, then all methods described so far teach a degradation via glycolysis to 3-phosphoglycerate and further via L-serine pathway reactions to MEG. However, this way this 3-carbon compound will be degraded to one 2-carbon compound (MEG), losing one CO₂ per MEG, which is true for all described pathway variations. The CO₂ production in excess is accompanied by an overproduction of reducing equivalents (NADH) and leads to a significant loss of yield potential (only 0.69 g_MEG per gram of sugar, vs 0.82 g_MEG thermodynamic maximum yield potential):

1D-glucose→2MEG+2CO₂+2NADH, y=0.69 g/g

[0135] Fermentative MEG production is described in WO2010/076324 (or US2011/0294178; Metabolic Explorer), which is herein incorporated in its entirety. This application suggested diol production via 2-ketoacid decarboxylation and reduction, including a serine biosynthesis based pathway to the intermediate hydroxypyruvate and further to ethyleneglycol. However, the disclosed pathway has a reduced total yield potential of 0.69 g_MEG/g_glucose, while the thermodynamic maximum yield for a glucose→MEG conversion is 0.82 g/g. This pathway is also not redox balanced and has a high excess of 2 mol NADH per mol of consumed glucose, all of which needs to be re-oxidized for the cell to be viable. In an aerobic fermentation, this NADH can be used to generate ATP, which however would be in high excess (2 NADH→6 ATP), leading to excess biomass formation during the production phase and therefore reduced product formation and yield.

[0136] Thus, the fermentative MEG production pathway disclosed in WO2010/076324 has an ATP shortage (−1ATP per MEG), excess NADH (+1 NADH per MEG), low yield potential (ymax=0.69 g_MEG/g_glucose) and is a challenging pathway that has not been demonstrated at high efficiency/productivity.

[0137] The disclosure of WO2011/130378A1 (or US2011/0312049; Genomatica) proposes an approach similar to WO2010/076324 to produce MEG from glucose via hydroxypyruvate, but also mentions pathway variations with alternative, but related key intermediates glycerate or ethanolamine.

[0138] The disclosure of WO2011/130378A1 has the same drawbacks as WO2010/076324, except for ATP shortage. ATP can be +0 or +1 per MEG, depending on utilized enzymes.

[0139] The present disclosure allows a redox-neutral MEG yield from D-glucose of 0.827 g/g if the non-oxidative pentose phosphate pathway is used to transform D-glucose to D-ribose 5-phosphate (FIG. 4).

5/6D-glucose or 1D-xylose→2MEG+1CO₂+0NADH, y=0.827 g/g

[0140] Turning to the use of D-xylose, other recent disclosures have demonstrated D-xylose to MEG pathways with a yield of 0.827 g/g.

[0141] A demonstrated fermentative production of MEG from xylose (WO2013/126721), via ribulose-1-phosphate, has a high yield potential (0.82 g_MEG/g_xylose) which equals the thermodynamic maximum yield. It produces MEG via two different pathways which are active in parallel, a 2-carbon stream (via glycolaldehyde) and a 3-carbon stream (via dihydroxyacetonephosphate). The C2 stream is easy to implement, but the C3 stream is difficult to implement at high efficiency via metabolic engineering. The C3 stream utilizes the pathways presented in WO2010/076324 or WO2011/130378.

[0142] Assuming a typically ATP driven xylose import, the overall process is at least ATP neutral. Thus, some xylose and therefore yield will be lost in order to obtain some surplus ATP required for cell growth and maintenance.

[0143] However, the uptake of xylose is not as efficient and fast as that of glucose, the preferred carbon source of most microorganisms. Also, presence of glucose in the media usually inhibits utilization of other sugars such as xylose. For a more efficient process, the organism's regulation leading to this preferential consumption needs to be disrupted and the strain adapted towards xylose preference or sugar co-consumption.

[0144] The key challenge, however, is obtaining xylose as an affordable and clean feedstock. Xylose as pure chemical is expensive and not available in bulk quantities. Xylose in hemicellulose hydrolysates is available in larger quantities and at potentially lower cost than glucose, but is accompanied by many impurities and substances that inhibit fermentations.

[0145] Therefore, the fermentative production of MEG (or glycolic acid) from xylose (WO2013/126721) poses a challenge with respect to using xylose as feedstock (availability, price, purity, inhibition of xylose utilization by glucose) and to using a C3 pathway, which has not been demonstrated at high efficiency/productivity. Moreover, there is an ATP shortage, +0ATP (or −1ATP if not using glycerate kinase), which is not sufficient for cell maintenance.

[0146] A further demonstrated fermentative production of MEG from xylose (Alkim et al., Microb Cell Fact (2015) 14:127), via xylulose-1-phosphate, is very similar to the route described by WO2013/126721. It has the same high yield potential (0.82 g/g), difficult to implement C3 stream for MEG production via DHAP, ATP shortage and feedstock challenges.

[0147] Another demonstrated fermentative production of MEG from xylose (WO2013/119020), via xylonate, shares similarities to the route described by WO2013/126721. It produces glycolaldehyde and pyruvate as key intermediates, allowing MEG production from glycolaldehyde with a yield potential of 0.41 g/g. This represents a high relative yield since it is achieved with only half the flux. However, no pathway to convert the remaining pyruvate to MEG is presented in WO2013/119020 or elsewhere. Currently, no realistic and efficient pathway is known to convert pyruvate to MEG. While pyruvate as a co-product itself would enable a redox neutral overall process (+0 NADH), it is not an economically interesting product and the process would lack 1 ATP (probably ˜2 ATP more for pyruvate export). Thus, ideally a pyruvate derived, economically interesting co-product at high yield is required that delivers surplus ATP. Therefore, the fermentative production of MEG from xylose (WO2013/119020), via xylonate, poses a challenge with respect to using xylose as feedstock (availability, price, purity, inhibition of xylose utilization by glucose), low absolute yield of MEG, ATP shortage (depending on co-product, it could be −1 to −3 ATP with pyruvate), and to requiring a pyruvate derived co-product with high yield potential and surplus ATP.

[0148] The present disclosure presents a further solution for high yield MEG production from D-xylose. However, unlike the previous solutions, this solution also allows a high yield MEG production from D-glucose, using the same core degradation pathway.

[0149] High Yield Co-Production of MEG and DHAP Derived Compounds

[0150] The present disclosure also allows for an advantageous, high yield pathway for the co-production of MEG, which requires reducing equivalents, with a compound whose biosynthetic pathway generates reducing equivalents, such as acetone, 2-propanol, propene, isobutene, and/or serine pathway compounds. In some embodiments, the serine pathway compounds include L-serine, glycine, monoethanolamine (MEA) and/or ethylenediamine (EDA). While the synergistic co-production of MEG with other compounds has been described previously (see U.S. Application No. 62/305,814, U.S. Application No. 62/430,742 and U.S. Application No. 62/406,684, each of which is herein incorporated in its entirety), this solution allow utilization not just of D-xylose, but D-glucose and even mixtures of D-glucose and D-xylose with the same high yield and synergistic co-production advantages.

[0151] High Yield Production of Glycolic Acid (GA)

[0152] The described pathways from D-glucose to GA also go through 3-phosphoglycerate and L-serine pathway reactions, or via the glyoxylate shunt. In both cases, one CO₂ is lost per glycolic acid, again in excess, leading to a maximum yield of only 0.84 g/g, much lower than the thermodynamic maximum yield potential (1.7 g/g):

1D-glucose→2GA+2CO₂+6NADH, y=0.84 g/g

[0153] New pathways with improved yield for the production of GA have been described (WO2016079440, WO2013126721, WO2013119020). However, they work only if D-xylose is used as carbon source, which is currently not readily available as a commodity:

1D-xylose→2GA+1CO₂+4NADH, y=1.01 g/g

[0154] Using the compositions and methods of the present disclosure, the yield from D-glucose (with non-oxidative pentose phosphate pathway) is significantly increased. It also works with D-xylose with the same yield (FIG. 5):

5/6D-glucose or 1D-xylose->2GA+1CO2+4NADH, y=1.01 g/g

[0155] The following stoichiometries are given for production of MEG (or glycolic acid, GA) via standard pathways using D-glucose or D-xylose versus the pathways of the present disclosure using D-glucose or D-xylose.

[0156] Stoichiometries associated with standard D-glucose pathways (such as disclosed in WO2010/076324 or WO2011/130378A1) for MEG or GA production:

1D-glucose→2GA+6NADH+0ATP; y=0.844 g/g

Or 1D-glucose→2MEG+4NADH+0ATP; y=0.689 g/g

[0157] Stoichiometries associated with pathways of the present disclosure using D-glucose for MEG or GA production:

2.5D-glucose+2.5ATP+0.5phosphate→3R5P→3GA+3DHAP+3NADH→6GA+12NADH+3ATP

1D-glucose→2.4GA+4.8NADH+1.2ATP; y=1.01 g/g

Or 1D-glucose→2.4MEG+0NADH+1.2ATP, y=0.827 g/g

[0158] Stoichiometries associated with standard D-xylose pathways (such as pathways disclosed in WO2013/126721 or in Alkim et al., Microb Cell Fact (2015) 14:127) for MEG or GA production:

1D-xylose→2GA+4NADH−1ATP*; y=1.01 g/g

Or 1D-xylose→2MEG+0NADH−1ATP*; y=0.827 g/g

[0159] *˜0.1 ATP if XylE symporter is used instead of XylFGH active xylose importer

[0160] Stoichiometries associated with pathways of the present disclosure using D-xylose for MEG or GA production:

1D-xylose+2ATP→D-xylulose 5-P→D-Ribose 5-P→GA+1NADH+DHAP→2GA+4NADH+1ATP

1D-xylose→2GA+4NADH−1ATP*; y=1.01 g/g

Or 1D-xylose→2MEG+0NADH-1ATP*; y=0.827 g/g

[0161] *˜0.1 ATP if XylE symporter is used instead of XylFGH active xylose importer

### Monoethylene Glycol (MEG)

[0162] Monoethylene glycol (MEG) is an important raw material for industrial applications. A primary use of MEG is in the manufacture of polyethylene terephthalate (PET) resins, films and fibers. In addition, MEG is important in the production of antifreezes, coolants, aircraft anti-icer and deicers and solvents. MEG is also known as ethane-1,2-diol.

[0163] Ethylene glycol is also used as a medium for convective heat transfer in, for example, automobiles and liquid cooled computers.

[0164] Because of its high boiling point and affinity for water, ethylene glycol is a useful desiccant. Ethylene glycol is widely used to inhibit the formation of natural gas clathrates (hydrates) in long multiphase pipelines that convey natural gas from remote gas fields to a gas processing facility. Ethylene glycol can be recovered from the natural gas and reused as an inhibitor after purification treatment that removes water and inorganic salts.

[0165] Minor uses of ethylene glycol include in the manufacture of capacitors, as a chemical intermediate in the manufacture of 1,4-dioxane, and as an additive to prevent corrosion in liquid cooling systems for personal computers. Ethylene glycol is also used in the manufacture of some vaccines; as a minor ingredient in shoe polish, inks and dyes; as a rot and fungal treatment for wood; and as a preservative for biological specimens.

### Glycolic Acid

[0166] Glycolic acid is used in the textile industry as a dyeing and tanning agent, in food processing as a flavoring agent and as a preservative, and in the pharmaceutical industry as a skin care agent. It is also used in adhesives and plastics. Glycolic acid is often included into emulsion polymers, solvents and additives for ink and paint in order to improve flow properties and impart gloss. It is used in surface treatment products that increase the coefficient of friction on tile flooring.

[0167] Due to its excellent capability to penetrate skin, glycolic acid finds applications in skin care products to improve the skin's appearance and texture. It can be used as a chemical peel performed by a dermatologist in concentrations of 20 to 70% or at-home kits in lower concentrations between 10 and 20%. In addition to concentration, pH also plays a large part in determining the potency of glycolic acid in solution.

[0168] Glycolic acid can be synthesized in various ways. The predominant approach uses a catalyzed reaction of formaldehyde with synthesis gas (carbonylation of formaldehyde), for its low cost. It is also prepared by the reaction of chloroacetic acid with sodium hydroxide followed by re-acidification. Other methods, not noticeably in use, include hydrogenation of oxalic acid, and hydrolysis of the cyanohydrin derived from formaldehyde. Some of today's glycolic acids are formic acid-free. Glycolic acid can be isolated from natural sources, such as sugarcane, sugar beets, pineapple, cantaloupe and unripe grapes.

[0169] Glycolic acid is a useful intermediate for organic synthesis, in a range of reactions including: oxidation-reduction, esterification and long chain polymerization. It is used as a monomer in the preparation of polyglycolic acid and other biocompatible copolymers (e.g. PLGA). Commercially, important derivatives include the methyl (CAS#96-35-5) and ethyl (CAS#623-50-7) esters which are readily distillable. The butyl ester is a component of some varnishes, being desirable because it is nonvolatile and has good dissolving properties.

### Acetone

[0170] Acetone (also known as propanone) is an organic compound with the formula (CH3)₂CO. It is a colorless, volatile, flammable liquid, and is the simplest ketone.

[0171] Acetone is miscible with water and serves as an important solvent, typically for cleaning purposes in the laboratory. Over 6.7 million tonnes are produced worldwide, mainly for use as a solvent and production of methyl methacrylate and bisphenol A. It is a common building block in organic chemistry. Familiar household uses of acetone are as the active ingredient in nail polish remover and as paint thinner.

### Isopropanol

[0172] Isopropyl alcohol (IUPAC name 2-propanol), also called isopropanol, is a compound with the chemical formula C₃H₈O or C₃H₇OH or CH₃CHOHCH₃. It is a colorless, flammable chemical compound with a strong odor. It is the simplest example of a secondary alcohol, where the alcohol carbon atom is attached to two other carbon atoms sometimes shown as (CH3)₂CHOH. It is a structural isomer of propanol. It has a wide variety of industrial and household uses.

[0173] Propene, also known as propylene or methyl ethylene, is an unsaturated organic compound having the chemical formula C₃H₆. It has one double bond, and is the second simplest member of the alkene class of hydrocarbons.

[0174] Propene is produced from fossil fuels—petroleum, natural gas, and, to a much lesser extent, coal. Propene is a byproduct of oil refining and natural gas processing.

### Isobutene

[0175] Isobutene (also known as isobutylene or 2-methylpropene) is a hydrocarbon of industrial significance. It is a four-carbon branched alkene (olefin), one of the four isomers of butylene (butene). At standard temperature and pressure it is a colorless flammable gas.

[0176] Isobutene is used as an intermediate in the production of a variety of products. It is reacted with methanol and ethanol in the manufacture of the gasoline oxygenates methyl tert-butyl ether (MTBE) and ethyl tert-butyl ether (ETBE), respectively. Alkylation with butane produces isooctane, another fuel additive. Isobutene is also used in the production of methacrolein. Polymerization of isobutene produces butyl rubber (polyisobutene). Antioxidants such as butylated hydroxytoluene (BHT) and butylated hydroxyanisole (BHA) are produced by Friedel-Crafts alkylation of phenols using isobutene.

[0177] Polymer and chemical grade isobutene is typically obtained by dehydrating tertiary butyl alcohol or catalytic dehydrogenation of isobutane. Gasoline oxygenates MTBE and ETBE are generally produced by reacting methanol or ethanol with isobutene contained in butene streams from olefin steam crackers or refineries. Isobutene is not isolated before the reaction as separating the ethers from the remaining butenes is simpler.

### Serine Pathway Compounds

[0178] Compounds that may be co-produced with MEG (or glycolic acid) include serine pathway compounds, for example, serine, glycine, monoethanolamine (MEA) and ethylenediamine (EDA).

[0179] Serine is a non-essential amino acid that can be synthesized in the human body. Being highly water soluble, serine finds application as moisturizer in lotions of pharma and cosmetic industry. Further, there is a huge market for serine in the chemical industry because it can be converted into other chemicals such as plastics, detergents, dietary supplements and a variety of other products. In fact, serine has been mentioned as one of the 30 most promising biological substances to replace chemicals from the oil industry.

[0180] The α-decarboxylation of serine yields ethanolamine, an industrial product used as an intermediate in the herbicide, textile, metal, detergent, plastics, and personal care products industries with a production volume running into several hundreds of kilotonnes per annum (Scott, E. et al. (2007) Biomass in the manufacture of industrial products—the use of proteins and amino acids. Appl Microbiol Biotechnol. 75(4): 751-762).

[0181] Glycine, the simplest amino acid, is valuable for pharmaceutical and industrial applications. It is included as an additive in pet food and animal feed. For humans, glycine is sold as a sweetener/taste enhancer. Certain food supplements and protein drinks contain glycine. Certain drug formulations include glycine to improve gastric absorption of the drug. Glycine serves as a buffering agent in antacids, analgesics, antiperspirants, cosmetics, and toiletries. Many miscellaneous products use glycine or its derivatives, such as the production of rubber sponge products, fertilizers and metal complexants. Glycine is also valuable as an intermediate in the synthesis of a variety of chemical products. It is used in the manufacture of the herbicide glyphosate. Glycine can be converted to oxalic acid, which is used as a bleaching agent in the textile and pulp industries and wastewater treatment. Glycine is also extensively used in laboratory research, for example, in gel electrophoresis.

[0182] Ethylenediamine (EDA) (1,2-diaminoethane, C₂H₄(NH₂)₂) is used in large quantities for production of many industrial chemicals. It forms derivatives with carboxylic acids (including fatty acids), nitriles, alcohols (at elevated temperatures), alkylating agents, carbon disulfide, and aldehydes and ketones. Because of its bifunctional nature, having two amines, it readily forms heterocycles such as imidazolidines. A most prominent derivative of ethylenediamine is the chelating agent EDTA, which is derived from ethylenediamine via a Strecker synthesis involving cyanide and formaldehyde. Hydroxyethylethylenediamine is another commercially significant chelating agent. Numerous bio-active compounds and drugs contain the N—CH2-CH2-N linkage, including some antihistamines. Salts of ethylenebisdithiocarbamate are commercially significant fungicides under the brand names Maneb, Mancozeb, Zineb, and Metiram. Some imidazoline-containing fungicides are derived from ethylenediamine. Ethylenediamine is an ingredient in the common bronchodilator drug aminophylline, where it serves to solubilize the active ingredient theophylline. Ethylenediamine has also been used in dermatologic preparations. When used as a pharmaceutical excipient, after oral administration its bioavailability is about 0.34, due to a substantial first-pass effect. Less than 20% is eliminated by urinal excretion. Ethylenediamine, because it contains two amine groups, is a widely used precursor to various polymers. Condensates derived from formaldehyde are plasticizers. It is widely used in the production of polyurethane fibers. The PAMAM class of dendrimers are derived from ethylenediamine. The bleaching activator tetraacetylethylenediamine is generated from ethylenediamine. The derivative N,N-ethylenebis(stearamide) (EBS) is a commercially significant mold-release agent and a surfactant in gasoline and motor oil.

[0183] Ethylenediamine is also used as: a solvent to solubilize proteins such as albumins and casein; certain electroplating baths; corrosion inhibitor in paints and coolants; chemicals for color photography developing, binders, adhesives, fabric softeners, curing agents for epoxys, and dyes. Ethylenediamine dihydroiodide (EDDI) is added to animal feeds as a source of iodide.

### Enzymes

[0184] Exemplary enzymes that may be used in the MEG or glycolic acid, or MEG and one or more co-product, biosynthesis pathways disclosed herein are listed in Table 1.

TABLE 1

| | | | | | |
|---|---|---|---|---|---|
| | | | | | Natural/ |
| | | Required enzyme | Gene | Source | annotated |
| Described Reaction | EC no. | activity | candidate | Organism | function |

Isomerases that may be used in conversion of D-xylose to D-xylulose

| | | | | | |
|---|---|---|---|---|---|
| D-xylopyranose <=> | 5.3.1.5 | xylose isomerase | xylA | Pyromyces sp. | xylose isomerase |
| D-xylulose | | | | | |
| D-xylopyranose <=> | 5.3.1.5 | xylose isomerase | xylA | Escherichia coli | xylose isomerase |
| D-xylulose | | | | | |

Glycolaldehyde reductases that may be used to convert glycolaldehyde to MEG

| | | | | | |
|---|---|---|---|---|---|
| glycolaldehyde + | 1.1.1.— | glycolaldehyde | gldA | Escherichia coli | glycerol |
| NAD(P)H <=> | | reductase | | | dehydrogenase |
| monoethylene glycol + | | | | | |
| NAD(P)+ | | | | | |
| glycolaldehyde + | 1.1.1.— | glycolaldehyde | GRE2 | Saccharomyces | methylglyoxal |
| NAD(P)H <=> | | reductase | | cerevisiae | reductase |
| monoethylene glycol + | | | | | |
| NAD(P)+ | | | | | |
| glycolaldehyde + | 1.1.1.— | glycolaldehyde | GRE3 | Saccharomyces | aldose reductase |
| NAD(P)H <=> | | reductase | | cerevisiae | |
| monoethylene glycol + | | | | | |
| NAD(P)+ | | | | | |
| glycolaldehyde + | 1.1.1.— | glycolaldehyde | yqhD* | Escherichia coli | Alcohol |
| NAD(P)H <=> | | reductase | | | dehydrogenase |
| monoethylene glycol + | | | | | |
| NAD(P)+ | | | | | |
| glycolaldehyde + | 1.1.1.— | glycolaldehyde | yqhD | Escherichia coli | Alcohol |
| NAD(P)H <=> | | reductase | | | dehydrogenase |
| monoethylene glycol + | | | | | |
| NAD(P)+ | | | | | |
| glycolaldehyde + | 1.1.1.— | glycolaldehyde | ydjg | Escherichia coli | methylglyoxal |
| NAD(P)H <=> | | reductase | | | reductase |
| monoethylene glycol + | | | | | |
| NAD(P)+ | | | | | |
| glycolaldehyde + | 1.1.1.— | glycolaldehyde | fucO | Escherichia coli | lactaldehyde |
| NAD(P)H <=> | | reductase | | | reductase |
| monoethylene glycol + | | | | | |
| NAD(P)+ | | | | | |
| glycolaldehyde + | 1.1.1.— | glycolaldehyde | yafB | Escherichia coli | methylglyoxal |
| NAD(P)H <=> | | reductase | (dkgB) | | reductase |
| monoethylene glycol + | | | | | [multifunctional] |
| NAD(P)+ | | | | | |
| glycolaldehyde + | 1.1.1.— | glycolaldehyde | yqhE | Escherichia coli | 2,5-diketo-D- |
| NAD(P)H <=> | | reductase | (dkgA) | | gluconic acid |
| monoethylene glycol + | | | | | reductase A |
| NAD(P)+ | | | | | |

Enzymes that may be used in 2-propanol (IPA) pathway via acetone
or in acetone pathway to isobutene

| | | | | | |
|---|---|---|---|---|---|
| 2 acetyl-Coa −> | 2.3.1.9 | acetyl coenzyme | thlA | Clostridium | acetyl coenzyme |
| acetoacetyl-CoA + CoA | | A acetyltransferase | | acetobutylicum | A acetyltransferase |
| 2 acetyl-Coa −> | 2.3.1.9 | acetyl coenzyme | atoB | Escherichia coli | acetyl coenzyme |
| acetoacetyl-CoA + CoA | | A acetyltransferase | | | A acetyltransferase |
| 2 acetyl-Coa −> | 2.3.1.9 | acetyl coenzyme | ERG10 | Saccharomyces | acetyl coenzyme |
| acetoacetyl-CoA + CoA | | A acetyltransferase | | cerevisiae | A acetyltransferase |
| acetoacetyl-CoA + | 2.8.3.8 | Acetyl-CoA: | atoA | Escherichia coli | Acetyl-CoA: |
| acetate −> | | acetoacetate-CoA | | | acetoacetate-CoA |
| acetoacetate + | | transferase | | | transferase |
| acetyl-CoA | | subunit | | | subunit |
| acetoacetyl-CoA + | 2.8.3.8 | Acetyl-CoA: | atoD | Escherichia coli | Acetyl-CoA: |
| acetate −> | | acetoacetate-CoA | | | acetoacetate-CoA |
| acetoacetate + | | transferase | | | transferase |
| acetyl-CoA | | subunit | | | subunit |
| acetoacetate −> | 4.1.1.4 | acetoacetate | adc | Clostridium | acetoacetate |
| acetone + CO2 | | decarboxylase | | acetobutylicum | decarboxylase |
| acetoacetate −> | 4.1.1.4 | acetoacetate | adc | Clostridium | acetoacetate |
| acetone + CO2 | | decarboxylase | | beijerinckii | decarboxylase |
| acetone + acetyl-CoA + | 2.3.3.— | 3-hydroxy- | Hmgcs1 | Mus musculus | hydroxymethylglutaryl- |
| H2O <−> 3-hydroxy- | | isovalerate | | | CoA synthase |
| isovalerate | | synthase | | | |
| acetone + acetyl-CoA + | 2.3.3.— | 3-hydroxy- | ERG13 | Saccharomyces | hydroxymethylglutaryl- |
| H2O <−> 3-hydroxy- | | isovalerate | | cerevisiae | CoA synthase |
| isovalerate | | synthase | | | |
| acetone + acetyl-CoA + | 2.3.3.— | 3-hydroxy- | PksG | Lactobacillus | hydroxymethylglutaryl- |
| H2O <−> 3-hydroxy- | | isovalerate | | crispatus ST1 | CoA synthase/polyketide |
| isovalerate | | synthase | | | intermediate |
| | | | | | transferase |
| acetone + acetyl-CoA + | 2.3.3.— | 3-hydroxy- | Pnap_0477 | Polaromonas | hydroxymethylglutaryl- |
| H2O <−> 3-hydroxy- | | isovalerate | | naphthalenivorans | CoA lyase |
| isovalerate | | synthase | | | |
| 3-hydroxy-isovalerate + | 2.7.1.— | hydroxyisovalerate | TA1305 | Thermoplasma | mevalonate- |
| ATP <−> ADP + H(+) + | | kinase | | acidophilum | diphosphate |
| 3- | | | | | decarboxylase/ |
| phosphonoxyisovalerate | | | | | mevalonate- |
| | | | | | monophosphate |
| | | | | | decarboxylase |
| 3-hydroxy-isovalerate + | 2.7.1.— | hydroxyisovalerate | TA1305* | Thermoplasma | mevalonate- |
| ATP <−> ADP + H(+) + | | kinase | (L200E) | acidophilum | diphosphate |
| 3- | | | | | decarboxylase/ |
| phosphonoxyisovalerate | | | | | mevalonate- |
| | | | | | monophosphate |
| | | | | | decarboxylase |
| 3-hydroxy-isovalerate + | 2.7.1.— | hydroxyisovalerate | PTO1356 | Picrophilus | mevalonate- |
| ATP <−> ADP + H(+) + | | kinase | | torridus | diphosphate |
| 3- | | | | | decarboxylase |
| phosphonoxyisovalerate | | | | | |
| 3- | 4.1.1.— | 3-phosphonoxyisovalerate | smi_1746 | Streptococcus | mevalonate- |
| phosphonoxyisovalerate −> | | decarboxylase | | mitis | diphosphate |
| CO(2) + isobutene | | | | | decarboxylase |
| 3- | 4.1.1.— | 3-phosphonoxyisovalerate | mvaD | Streptococcus | mevalonate- |
| phosphonoxyisovalerate −> | | decarboxylase | | gordonii | diphosphate |
| CO(2) + isobutene | | | | | decarboxylase |
| 3-hydroxy-isovalerate −> | 4.1.1.— | hydroxyisovalerate | TA1305 | Thermoplasma | mevalonate- |
| CO(2) + isobutene | | decarboxylase | | acidophilum | diphosphate |
| | | | | | decarboxylase |
| 3-hydroxy-isovalerate −> | 4.1.1.— | hydroxyisovalerate | PTO1356 | Picrophilus | mevalonate- |
| CO(2) + isobutene | | decarboxylase | | torridus | diphosphate |
| | | | | | decarboxylase |
| 3-hydroxy-isovalerate −> | 4.1.1.— | hydroxyisovalerate | mvaD | Streptococcus | mevalonate- |
| CO(2) + isobutene | | decarboxylase | | gordonii | diphosphate |
| | | | | | decarboxylase |

Hydrolases that may be used in improved acetone pathway to isobutene

| | | | | | |
|---|---|---|---|---|---|
| Acetoacetyl-CoA + | 3.1.2.11 | acetate: | ctfA | Clostridium | butyrate- |
| H(2)O <=> CoA + | | acetoacetyl-CoA | | acetobutylicum | acetoacetate CoA- |
| acetoacetate | | hydrolase | | | transferase, complex |
| | | | | | A |
| Acetoacetyl-CoA + | 3.1.2.11 | acetate: | ctfB | Clostridium | butyrate- |
| H(2)O <=> CoA + | | acetoacetyl-CoA | | acetobutylicum | acetoacetate CoA- |
| acetoacetate | | hydrolase | | | transferase, subunit |
| | | | | | B |
| Acetoacetyl-CoA + | 3.1.2.11 | acetate: | atoA | Escherichia coli | Acetyl-CoA: |
| H(2)O <=> CoA + | | acetoacetyl-CoA | | (strain K12) | acetoacetate-CoA |
| acetoacetate | | hydrolase | | | transferase |
| | | | | | subunit |
| Acetoacetyl-CoA + | 3.1.2.11 | acetate: | atoD | Escherichia coli | Acetyl-CoA: |
| H(2)O <=> CoA + | | acetoacetyl-CoA | | (strain K12) | acetoacetate-CoA |
| acetoacetate | | hydrolase | | | transferase |
| | | | | | subunit |

Enzymes that may be used in HMG-CoA pathway to isobutene

| | | | | | |
|---|---|---|---|---|---|
| acetyl-CoA + H2O + | 2.3.3.10 | HMG-CoA | hmgS | Saccharomyces | HMG-CoA synthase |
| acetoacetyl-CoA <=> | | synthase | | cerevisiae | |
| (S)-3-hydroxy-3- | | | | | |
| methylglutaryl-CoA + | | | | | |
| CoA | | | | | |
| (S)-3-hydroxy-3- | 4.2.1.18 | methylglutaconyl-CoA | liuC | Pseudomonas | methylglutaconyl- |
| methylglutaryl-CoA <=> | | hydratase | | putida | CoA hydratase |
| trans-3- | | | | | |
| methylglutaconyl-CoA + | | | | | |
| H(2)O | | | | | |
| ADP + phosphate + 3- | 6.4.1.4. | methylcrotonyl-CoA | liuB | Pseudomonas | methylcrotonyl-CoA |
| methylglutaconyl-CoA <=> | | carboxylase | | aeruginosa | carboxylase subunit |
| ATP + 3- | | | | | beta |
| methylcrotonoyl-CoA + | | | | | |
| HCO(3)(−) | | | | | |
| ADP + phosphate + 3- | 6.4.1.4. | methylcrotonyl-CoA | liuD | Pseudomonas | methylcrotonyl-CoA |
| methylglutaconyl-CoA <=> | | carboxylase | | aeruginosa | carboxylase subunit |
| ATP + 3- | | | | | alpha |
| methylcrotonoyl-CoA + | | | | | |
| HCO(3)(−) | | | | | |
| trans-2(or 3)-enoyl-CoA + | 4.2.1.17 | methylcrotonyl-CoA | fadA | E. coli | fatty acid oxidation |
| H(2)O <=> (3S)-3- | | hydratase | | | complex, 3-ketoacyl- |
| hydroxyacyl-CoA | | | | | CoA thiolase |
| trans-2(or 3)-enoyl-CoA + | 4.2.1.17 | methylcrotonyl-CoA | fadB | E. coli | fatty acid oxidation |
| H(2)O <=> (3S)-3- | | hydratase | | | complex, enoyl-CoA |
| hydroxyacyl-CoA | | | | | hydratase |
| 3-hydroxy-isovaleryl- | 3.1.2.— | 3-hydroxy- | tesB | E. coli | acyl-CoA |
| CoA + H2O <=> 3- | | isovaleryl-CoA | | | thioesterase |
| hydroxy- | | thioesterase | | | |
| isovalerate + CoA | | | | | |

Enzymes that may be used in 2-propanol (IPA) pathway via acetone

| | | | | | |
|---|---|---|---|---|---|
| acetone + NAD(P)H −> | 1.1.1.2 | secondary | adh | Clostridium | secondary alcohol |
| 2-propanol + NAD(P)+ | | alcohol | | beijerinckii | dehydrogenase |
| | | dehydrogenase | | | |
| acetone + NAD(P)H −> | 1.1.1.2 | secondary | adh | Clostridium | alcohol |
| 2-propanol + NAD(P)+ | | alcohol | | carboxidivorans | dehydrogenase |
| | | dehydrogenase | | | |
| NADH + NADP+ <−−> | 1.6.1.1. | Soluble pyridine | udhA | Escherichia coli | Soluble pyridine |
| NAD+ + NADPH | | nucleotide | | | nucleotide |
| | | transhydrogenase | | | transhydrogenase |

Enzymes that may be used in pentose and/or hexose to
D-ribose-5-phosphate

| | | | | | |
|---|---|---|---|---|---|
| ATP + D-xylulose = | 2.7.1.17 | Xylulose | xylB | E. coli | Xylulose kinase |
| ADP + D-xylulose 5- | | 5-kinase | | | |
| phosphate | | | | | |
| ATP + D-ribose = | | ribokinase | rbsK | E. coli | Pentose kinase |
| ADP + D-ribose 5- | | | | | |
| phosphate | | | | | |
| ATP + D-xylulose = | | xylulokinase | XuK | Thermotoga | Pentose kinase |
| ADP + D-xylulose 5- | | | | maritima | |
| phosphate | | | | | |
| ATP + D-ribulose = | | ribulokinase | araB | E. coli | Pentose kinase |
| ADP + D-ribulose 5- | | | | | |
| phosphate | | | | | |
| D-erythrose 4- | 2.2.1.1 | Transketolase | tktA | E. coli | Transketolase |
| phosphate + D-xylulose | | | | | |
| 5-phosphate ↔ β-D- | | | | | |
| fructofuranose 6- | | | | | |
| phosphate + D- | | | | | |
| glyceraldehyde 3- | | | | | |
| phosphate | | | | | |
| D-sedoheptulose 7- | 2.2.1.1 | Transketolase | tktA | E. coli | Transketolase |
| phosphate + D- | | | | | |
| glyceraldehyde 3- | | | | | |
| phosphate ↔ D-ribose | | | | | |
| 5-phosphate + D- | | | | | |
| xylulose 5-phosphate | | | | | |
| D-erythrose 4- | 2.2.1.1 | Transketolase | tktB | E. coli | Transketolase |
| phosphate + D-xylulose | | | | | |
| 5-phosphate ↔ β-D- | | | | | |
| fructofuranose 6- | | | | | |
| phosphate + D- | | | | | |
| glyceraldehyde 3- | | | | | |
| phosphate | | | | | |
| D-sedoheptulose 7- | 2.2.1.1 | Transketolase | tktB | E. coli | Transketolase |
| phosphate + D- | | | | | |
| glyceraldehyde 3- | | | | | |
| phosphate ↔ D-ribose | | | | | |
| 5-phosphate + D- | | | | | |
| xylulose 5-phosphate | | | | | |
| D-sedoheptulose 7- | 2.2.1.2 | Transaldolase | talA | E. coli | Transaldolase |
| phosphate + D- | | | | | |
| glyceraldehyde 3- | | | | | |
| phosphate ↔ β-D- | | | | | |
| fructofuranose 6- | | | | | |
| phosphate + D- | | | | | |
| erythrose 4-phosphate | | | | | |
| D-sedoheptulose 7- | 2.2.1.2 | Transaldolase | talB | E. coli | Transaldolase |
| phosphate + D- | | | | | |
| glyceraldehyde 3- | | | | | |
| phosphate ↔ β-D- | | | | | |
| fructofuranose 6- | | | | | |
| phosphate + D- | | | | | |
| erythrose 4-phosphate | | | | | |
| D-ribose 5-phosphate ↔ | 5.3.1.6 | Ribose-5- | rpiA | E. coli | Ribose-5-phosphate |
| D-ribulose 5- | | phosphate | | | isomerase |
| phosphate | | isomerase | | | |
| D-ribose 5-phosphate ↔ | 5.3.1.6 | Ribose-5- | rpiB | E. coli | ibose-5-phosphate |
| D-ribulose 5- | | phosphate | | | isomerase |
| phosphate | | isomerase | | | |
| D-ribulose 5-phosphate ↔ | 5.1.3.1 | Ribulose-5- | rpe | E. coli | Ribulose-5- |
| D-xylulose 5- | | phosphate 3- | | | phosphate 3- |
| phosphate | | epimerase | | | epimerase |
| D-fructose 6-phosphate + | 4.1.2.22 | fructose 6- | BDP_1006 | Bifidobacterium | fructose 6- |
| phosphate ↔ acetyl | | phosphate | | dentium | phosphate |
| phosphate + D- | | phosphoketolase | | | phosphoketolase |
| erythrose 4-phosphate + | | (Fpk) | | | |
| H2O | | | | | |
| D-fructose 6-phosphate + | 4.1.2.22 | fructose 6- | xfp | Bifidobacterium | Xylulose-5- |
| phosphate ↔ acetyl | | phosphate | | lactis | phosphate/fructose- |
| phosphate + D- | | phosphoketolase | | | 6-phosphate |
| erythrose 4-phosphate + | | (Fpk) | | | phosphoketolase |
| H2O | | | | | |
| D-fructose 6-phosphate + | 4.1.2.22 | fructose 6- | xpkA | Lactobacillus | phosphoketolase |
| phosphate ↔ acetyl | | phosphate | | paraplantarum | |
| phosphate + D- | | phosphoketolase | | | |
| erythrose 4-phosphate + | | (Fpk) | | | |
| H2O | | | | | |
| D-fructose 6-phosphate + | 4.1.2.22 | fructose 6- | xfp | Bifidobacterium | phosphoketolase |
| phosphate ↔ acetyl | | phosphate | | breve | |
| phosphate + D- | | phosphoketolase | | | |
| erythrose 4-phosphate + | | (Fpk) | | | |
| H2O | | | | | |
| Acetyl-CoA + | 2.3.1.8 | Phosphate | pta | E. coli | Phosphate |
| phosphate ↔ CoA + | | acetyltransferase | | | acetyltransferase |
| acetyl phosphate. | | | | | |
| Acetyl-CoA + | 2.3.1.8 | Phosphate | pta | Clostridium | Phosphate |
| phosphate ↔ CoA + | | acetyltransferase | | acetobutylicum | acetyltransferase |
| acetyl phosphate. | | | | | |

Enzymes that may be used to convert D-ribose 5-phosphate,
D-ribulose 5-phosphate or D-xylulose 5-phosphate to
glycolaldehyde and glyceraldehyde-3-phosphate (G3P)

| | | | | | |
|---|---|---|---|---|---|
| D-ribose 5-phosphate → | 4.1.2.4 | pentose- | deoC | E. coli | Deoxyribose- |
| glycoladehyde + | | phosphate | | | phosphate aldolase |
| glyceraldehyde-3- | | aldolase (DERA) | | | |
| phosphate | | | | | |
| D-ribose 5-phosphate → | 4.1.2.4 | pentose- | deoC | B. caldolyticus | Deoxyribose- |
| glycoladehyde + | | phosphate | | | phosphate aldolase |
| glyceraldehyde-3- | | aldolase (DERA) | | | |
| phosphate | | | | | |

Enzymes that may be used in production of MEG, glycolic
acid, and/or one or more co-products

| | | | | | |
|---|---|---|---|---|---|
| hydroxypyruvate + | 4.1.1.— | Hydroxypyruvate | kivd | Lactococcus | α-ketoisovalerate |
| H+ ↔ CO2 + | | decarboxylase | | lactis | decarboxylase |
| glycolaldehyde | | | | | |
| hydroxypyruvate + | 4.1.1.— | Hydroxypyruvate | sucA | E. coli | 2-oxoglutarate |
| H+ ↔ CO2 + | | decarboxylase | | | decarboxylase |
| glycolaldehyde | | | | | |
| 3-phospho-D-glycerate + | 1.1.1.95 | D-3- | serA | E. coli | D-3- |
| NAD+ ↔ 3-phospho- | | phosphoglycerate | | | phosphoglycerate |
| hydroxypyruvate + | | dehydrogenase | | | dehydrogenase |
| NADH + H+ | | | | | |
| 3-phospho-L-serine + 2- | 2.6.1.52 | Phosphoserine | serC | E. coli | Phosphoserine |
| oxoglutarate ↔ L- | | aminotransferase | | | aminotransferase |
| glutamate + 3- | | | | | |
| phospho- | | | | | |
| hydroxypyruvate | | | | | |
| 3-phospho- | — | 3- | yeaB | E. coli | putative CoA |
| hydroxypyruvate + H2O → | | phosphohydroxy | (nudL) | | pyrophosphohydrolase |
| hydroxypyruvate + | | pyruvate | | | |
| phosphate | | phosphatase | | | |
| 3-phospho-L-serine + | 3.1.3.3 | Phosphoserine | serB | E. coli | Phosphoserine |
| H2O → L-serine + | | phosphatase | | | phosphatase |
| phosphate | | | | | |
| L-serine + H+ → | 4.1.1.65 | serine | AtSDC | Arabidopsis | serine decarboxylase |
| ethanolamine + CO2 | | decarboxylase | (AT1G43710) | thaliana | |
| ethanolamine + oxygen + | 1.4.3.8 | Ethanolamine | tynA | E. coli | amine oxidase |
| H2O → ammonium + | | oxidase | | | |
| hydrogen peroxide + | | | | | |
| glycolaldehyde | | | | | |
| ethanolamine + 2- | 2.6.1.— | Ethanolamine | alaA | E. coli | glutamate-pyruvate |
| oxoglutarate → | | aminotransferase | | | aminotransferase |
| glycolaldehyde + L- | | | | | |
| glutamate | | | | | |
| D-glycerate + | 1.1.1.— | Hydroxypyruvate | ghrB | E. coli | glyoxylate reductase |
| NAD(P)+ ↔ | | reductase | | | |
| hydroxypyruvate + | | | | | |
| NAD(P)H + H+ | | | | | |
| pyruvate + L-serine ↔ | 2.6.1.51 | serine-pyruvate | AGXT1 | Homo sapiens | serine-pyruvate |
| L-alanine + | | aminotransferase | | | aminotransferase |
| hydroxypyruvate | | | | | |
| 3-phospho-D-glycerate + | 3.1.3.38 | 3- | phoA | E. coli | phosphoglycerate |
| H2O → D-glycerate + | | phosphoglycerate | | | phosphatase |
| phosphate | | phosphatase | | | |
| 2-phospho-D-glycerate + | 3.1.3.20 | 2- | phoA | E. coli | phosphoglycerate |
| H2O → D-glycerate + | | phosphoglycerate | | | phosphatase |
| phosphate | | phosphatase | | | |
| D-glycerate + ATP ↔ | 2.7.1.31 | Glycerate | GLYK | Arabidopsis | Glycerate 3-kinase |
| 3-phospho-D-glycerate + | | 3-kinase | | thaliana | |
| ADP + H+ | | | | | |
| D-glycerate + ATP ↔ | 2.7.1.165 | Glycerate | glxK | E. coli | Glycerate 2-kinase |
| 2-phospho-D-glycerate + | | 2-kinase | | | |
| ADP + H+ | | | | | |
| D-glycerate + ATP ↔ | 2.7.1.165 | Glycerate | garK | E. coli | Glycerate 2-kinase |
| 2-phospho-D-glycerate + | | 2-kinase | | | |
| ADP + H+ | | | | | |

| | | | | |
|---|---|---|---|---|
| | | SEQ | | SEQ |
| | Gene | ID | | ID |
| | Identifier | NO | Uniprot | NO |
| Described Reaction | (nt) | (nt) | ID | (AA) |

Isomerases that may be used in conversion of D-xylose to D-xylulose

| | | | | |
|---|---|---|---|---|
| D-xylopyranose <=> | ENA Nr.: | 93, 94 | Q9P8C9 | 95 |
| D-xylulose | CAB76571.1 | | | |
| D-xylopyranose <=> | GeneID: | 143 | P00944 | 144 |
| D-xylulose | 948141 | | | |

Glycolaldehyde reductases that may be used to convert glycolaldehyde to MEG

| | | | | |
|---|---|---|---|---|
| glycolaldehyde + | GeneID: | 12 | P0A9S5 | 13 |
| NAD(P)H <=> | 12933659 | | | |
| monoethylene glycol + | | | | |
| NAD(P)+ | | | | |
| glycolaldehyde + | GeneID: | 14 | Q12068 | 15 |
| NAD(P)H <=> | 854014 | | | |
| monoethylene glycol + | | | | |
| NAD(P)+ | | | | |
| glycolaldehyde + | GeneID: | 16 | P38715 | 17 |
| NAD(P)H <=> | 856504 | | | |
| monoethylene glycol + | | | | |
| NAD(P)+ | | | | |
| glycolaldehyde + | GeneID: | 18, 19 | Modified | 20 |
| NAD(P)H <=> | 947493 | | version of | |
| monoethylene glycol + | | | Q46856; | |
| NAD(P)+ | | | G149E | |
| glycolaldehyde + | GeneID: | 21, 22 | Q46856 | 23 |
| NAD(P)H <=> | 947493 | | | |
| monoethylene glycol + | | | | |
| NAD(P)+ | | | | |
| glycolaldehyde + | GeneID: | 24 | P77256 | 25 |
| NAD(P)H <=> | 12930149 | | | |
| monoethylene glycol + | | | | |
| NAD(P)+ | | | | |
| glycolaldehyde + | GeneID: | 26, 27 | P0A9S1 | 28 |
| NAD(P)H <=> | 947273 | | | |
| monoethylene glycol + | | | | |
| NAD(P)+ | | | | |
| glycolaldehyde + | 545778205 | 29 | P30863 | 30 |
| NAD(P)H <=> | | | | |
| monoethylene glycol + | | | | |
| NAD(P)+ | | | | |
| glycolaldehyde + | GeneID: | 31 | Q46857 | 32 |
| NAD(P)H <=> | 947495 | | | |
| monoethylene glycol + | | | | |
| NAD(P)+ | | | | |

Enzymes that may be used in 2-propanol (IPA) pathway via acetone
or in acetone pathway to isobutene

| | | | | |
|---|---|---|---|---|
| 2 acetyl-Coa −> | 3309200 | 33, 34 | P45359 | 35 |
| acetoacetyl-CoA + CoA | | | | |
| 2 acetyl-Coa −> | GeneID: | 36 | P76461 | 37 |
| acetoacetyl-CoA + CoA | 946727 | | | |
| 2 acetyl-Coa −> | 856079 | 38 | P41338 | 39 |
| acetoacetyl-CoA + CoA | | | | |
| acetoacetyl-CoA + | 48994873 | 41, 42 | P76459 | 43 |
| acetate −> | | | | |
| acetoacetate + | | | | |
| acetyl-CoA | | | | |
| acetoacetyl-CoA + | 48994873 | 44, 45 | P76458 | 46 |
| acetate −> | | | | |
| acetoacetate + | | | | |
| acetyl-CoA | | | | |
| acetoacetate −> | 6466901 | 47, 48 | P23670 | 49 |
| acetone + CO2 | | | | |
| acetoacetate −> | 149901357 | 50, 51 | A6M020 | 52 |
| acetone + CO2 | | | | |
| acetone +acetyl-CoA + | CCDS56901.1; | 104 | Q3UWQ9 | 105 |
| H2O <−> 3-hydroxy- | GeneID: | | | |
| isovalerate | 208715 | | | |
| acetone +acetyl-CoA + | GeneID: | 106 | P54839 | 107 |
| H2O <−> 3-hydroxy- | 854913 | | | |
| isovalerate | | | | |
| acetone +acetyl-CoA + | GeneID: | 108 | AEL95_01455 | 109 |
| H2O <−> 3-hydroxy- | 9107446 | | | |
| isovalerate | | | | |
| acetone + acetyl-CoA + | ABM35799.1 | 110 | A1VJH1 | 111 |
| H2O <−> 3-hydroxy- | | | | |
| isovalerate | | | | |
| 3-hydroxy-isovalerate + | GeneID: | 112 | Q9HIN1 | 113 |
| ATP <−> ADP + H(+) + | 1456782 | | | |
| 3- | | | | |
| phosphonoxyisovalerate | | | | |
| 3-hydroxy-isovalerate + | GeneID: | 114 | Modified | 115 |
| ATP <−> ADP + H(+) + | 1456782 | | version of | |
| 3- | | | Q9HIN1; | |
| phosphonoxyisovalerate | | | L200E | |
| 3-hydroxy-isovalerate + | GeneID: | 116 | Q6KZB1 | 117 |
| ATP <−> ADP + H(+) + | 2845209 | | | |
| 3- | | | | |
| phosphonoxyisovalerate | | | | |
| 3- | Genbank: | 118 | D3HAT7 | 119 |
| phosphonoxyisovalerate −> | CBJ22986.1 | | | |
| CO(2) + isobutene | | | | |
| 3- | GeneID: | 120 | A8AUU9 | 121 |
| phosphonoxyisovalerate −> | 25051665 | | | |
| CO(2) + isobutene | | | | |
| 3-hydroxy-isovalerate −> | GeneID: | 112 | Q9HIN1 | 113 |
| CO(2) + isobutene | 1456782 | | | |
| 3-hydroxy-isovalerate −> | GeneID: | 116 | Q6KZB1 | 117 |
| CO(2) + isobutene | 2845209 | | | |
| 3-hydroxy-isovalerate −> | GeneID: | 120 | A8AUU9 | 121 |
| CO(2) + isobutene | 25051665 | | | |

Hydrolases that may be used in improved acetone pathway to isobutene

| | | | | |
|---|---|---|---|---|
| Acetoacetyl-CoA + | NCBI-GeneID: | 96 | P33752 | 97 |
| H(2)O <=> CoA + | 1116168 | | | |
| acetoacetate | | | | |
| Acetoacetyl-CoA + | NCBI-GeneID: | 98 | P23673 | 99 |
| H(2)O <=> CoA + | 1116169 | | | |
| acetoacetate | | | | |
| Acetoacetyl-CoA + | GeneID: | 100 | P76459 | 101 |
| H(2)O <=> CoA + | 946719 | | | |
| acetoacetate | | | | |
| Acetoacetyl-CoA + | GeneID: | 102 | P76458 | 103 |
| H(2)O <=> CoA + | 947525 | | | |
| acetoacetate | | | | |

Enzymes that may be used in HMG-CoA pathway to isobutene

| | | | | |
|---|---|---|---|---|
| acetyl-CoA + H2O + | GeneID: | 122 | P54839 | 123 |
| acetoacetyl-CoA <=> | 854913 | | | |
| (S)-3-hydroxy-3- | | | | |
| methylglutaryl-CoA + | | | | |
| CoA | | | | |
| (S)-3-hydroxy-3- | GeneID: | 124 | Q88FM3 | 125 |
| methylglutaryl-CoA <=> | 1041856 | | | |
| trans-3- | | | | |
| methylglutaconyl-CoA + | | | | |
| H(2)O | | | | |
| ADP + phosphate + 3- | GeneID: | 126 | Q9I297 | 127 |
| methylglutaconyl-CoA <=> | 878244 | | | |
| ATP + 3- | | | | |
| methylcrotonoyl-CoA + | | | | |
| HCO(3)(−) | | | | |
| ADP + phosphate + 3- | GeneID: | 128 | Q9I299 | 129 |
| methylglutaconyl-CoA <=> | 879012 | | | |
| ATP + 3- | | | | |
| methylcrotonoyl-CoA + | | | | |
| HCO(3)(−) | | | | |
| trans-2(or 3)-enoyl-CoA + | GeneID: | 130 | P21151 | 131 |
| H(2)O <=> (3S)-3- | 948324 | | | |
| hydroxyacyl-CoA | | | | |
| trans-2(or 3)-enoyl-CoA + | GeneID: | 132 | P21177 | 133 |
| H(2)O <=> (3S)-3- | 948336 | | | |
| hydroxyacyl-CoA | | | | |
| 3-hydroxy-isovaleryl- | GeneID: | 134 | P0AGG2 | 135 |
| CoA + H2O <=> 3- | 945074 | | | |
| hydroxy- | | | | |
| isovalerate + CoA | | | | |

Enzymes that may be used in 2-propanol (IPA) pathway via acetone

| | | | | |
|---|---|---|---|---|
| acetone + NAD(P)H −> | 60592972 | 136,137 | P25984 | 138 |
| 2-propanol + NAD(P)+ | | | | |
| acetone + NAD(P)H −> | 308066805 | 139 | C6PZV5 | 140 |
| 2-propanol + NAD(P)+ | | | | |
| NADH + NADP+ <−−> | GeneID: | 141 | P27306 | 142 |
| NAD+ + NADPH | 948461 | | | |

Enzymes that may be used in pentose and/or hexose to
D-ribose-5-phosphate

| | | | | |
|---|---|---|---|---|
| ATP + D-xylulose = | GeneID: | 145 | P09099 | 146 |
| ADP + D-xylulose 5- | 948133 | | | |
| phosphate | | | | |
| ATP + D-ribose = | 948260 | 290 | P0A9J6 | |
| ADP + D-ribose 5- | | | | |
| phosphate | | | | |
| ATP + D-xylulose = | 896943 | 291 | Q9WXX1 | |
| ADP + D-xylulose 5- | | | | |
| phosphate | | | | |
| ATP + D-ribulose = | 946017 | 288 | P08204 | |
| ADP + D-ribulose 5- | | | | |
| phosphate | | | | |
| D-erythrose 4- | GeneID: | 147 | P27302 | 148 |
| phosphate + D-xylulose | 947420 | | | |
| 5-phosphate ↔ β-D- | | | | |
| fructofuranose 6- | | | | |
| phosphate + D- | | | | |
| glyceraldehyde 3- | | | | |
| phosphate | | | | |
| D-sedoheptulose 7- | GeneID: | 147 | P27302 | 148 |
| phosphate + D- | 947420 | | | |
| glyceraldehyde 3- | | | | |
| phosphate ↔ D-ribose | | | | |
| 5-phosphate + D- | | | | |
| xylulose 5-phosphate | | | | |
| D-erythrose 4- | GeneID: | 149 | P33570 | 150 |
| phosphate + D-xylulose | 945865 | | | |
| 5-phosphate ↔ β-D- | | | | |
| fructofuranose 6- | | | | |
| phosphate + D- | | | | |
| glyceraldehyde 3- | | | | |
| phosphate | | | | |
| D-sedoheptulose 7- | GeneID: | 149 | P33570 | 150 |
| phosphate + D- | 945865 | | | |
| glyceraldehyde 3- | | | | |
| phosphate ↔ D-ribose | | | | |
| 5-phosphate + D- | | | | |
| xylulose 5-phosphate | | | | |
| D-sedoheptulose 7- | GeneID: | 151 | P0A867 | 152 |
| phosphate + D- | 947006 | | | |
| glyceraldehyde 3- | | | | |
| phosphate ↔ β-D- | | | | |
| fructofuranose 6- | | | | |
| phosphate + D- | | | | |
| erythrose 4-phosphate | | | | |
| D-sedoheptulose 7- | GeneID: | 153 | P0A870 | 154 |
| phosphate + D- | 944748 | | | |
| glyceraldehyde 3- | | | | |
| phosphate ↔ β-D- | | | | |
| fructofuranose 6- | | | | |
| phosphate + D- | | | | |
| erythrose 4-phosphate | | | | |
| D-ribose 5-phosphate ↔ | GeneID: | 155 | P0A7Z0 | 156 |
| D-ribulose 5- | 947407 | | | |
| phosphate | | | | |
| D-ribose 5-phosphate ↔ | GeneID: | 254 | P37351 | 253 |
| D-ribulose 5- | 948602 | | | |
| phosphate | | | | |
| D-ribulose 5-phosphate ↔ | GeneID: | 157 | P0AG07 | 158 |
| D-xylulose 5- | 947896 | | | |
| phosphate | | | | |
| D-fructose 6-phosphate + | EMBL: | 211 | D2QA13 | 212 |
| phosphate ↔ acetyl | ADB09649.1 | | | |
| phosphate + D- | | | | |
| erythrose 4-phosphate + | | | | |
| H2O | | | | |
| D-fructose 6-phosphate + | GeneID: | 213 | Q9AEM9 | 214 |
| phosphate ↔ acetyl | 29696432 | | | |
| phosphate + D- | | | | |
| erythrose 4-phosphate + | | | | |
| H2O | | | | |
| D-fructose 6-phosphate + | EMBL: | 215 | Q6UPD8 | 216 |
| phosphate ↔ acetyl | AAQ64626.2 | | | |
| phosphate + D- | | | | |
| erythrose 4-phosphate + | | | | |
| H2O | | | | |
| D-fructose 6-phosphate + | EMBL: | 217 | D6PAH1 | 218 |
| phosphate ↔ acetyl | ADF97524.1 | | | |
| phosphate + D- | | | | |
| erythrose 4-phosphate + | | | | |
| H2O | | | | |
| Acetyl-CoA + | GeneID: | 219 | P0A9M8 | 220 |
| phosphate ↔ CoA + | 946778 | | | |
| acetyl phosphate. | | | | |
| Acetyl-CoA + | GeneID: | 221 | P71103 | 222 |
| phosphate ↔ CoA + | 1117925 | | | |
| acetyl phosphate. | | | | |

Enzymes that may be used to convert D-ribose 5-phosphate,
D-ribulose 5-phosphate or D-xylulose 5-phosphate to
glycolaldehyde and glyceraldehyde-3-phosphate (G3P)

| | | | | |
|---|---|---|---|---|
| D-ribose 5-phosphate → | GenBank: | 255 | P0A6L0 | 256 |
| glycoladehyde + | 948902 | | | |
| glyceraldehyde-3- | | | | |
| phosphate | | | | |
| D-ribose 5-phosphate → | | 286 or | A0A2H5KL15 | |
| glycoladehyde + | | 287 | | |
| glyceraldehyde-3- | | | | |
| phosphate | | | | |

Enzymes that may be used in production of MEG, glycolic
acid, and/or one or more co-products

| | | | | |
|---|---|---|---|---|
| hydroxypyruvate + | GenBank: | 223 | Q684J7 | 224 |
| H+ ↔ CO2 + | AJ746364.1 | | | |
| glycolaldehyde | | | | |
| hydroxypyruvate + | GeneID: | 225 | P0AFG3 | 226 |
| H+ ↔ CO2 + | 945303 | | | |
| glycolaldehyde | | | | |
| 3-phospho-D-glycerate + | GeneID: | 227 | P0A9T0 | 228 |
| NAD+ ↔ 3-phospho- | 945258 | | | |
| hydroxypyruvate + | | | | |
| NADH + H+ | | | | |
| 3-phospho-L-serine + 2- | GeneID: | 229 | P23721 | 230 |
| oxoglutarate ↔ L- | 945527 | | | |
| glutamate + 3- | | | | |
| phospho- | | | | |
| hydroxypyruvate | | | | |
| 3-phospho- | GeneID: | 231 | P43337 | 232 |
| hydroxypyruvate + H2O → | 946330 | | | |
| hydroxypyruvate + | | | | |
| phosphate | | | | |
| 3-phospho-L-serine + | GeneID: | 233 | P0AGB0 | 234 |
| H2O → L-serine + | 948913 | | | |
| phosphate | | | | |
| L-serine + H+ → | GeneID: | 235 | Q9MA74 | 236 |
| ethanolamine + CO2 | 840958 | | | |
| ethanolamine + oxygen + | GeneID: | 237 | P46883 | 238 |
| H2O → ammonium + | 945939 | | | |
| hydrogen peroxide + | | | | |
| glycolaldehyde | | | | |
| ethanolamine + 2- | GeneID: | 239 | P0A959 | 240 |
| oxoglutarate → | 946772 | | | |
| glycolaldehyde + L- | | | | |
| glutamate | | | | |
| D-glycerate + | GeneID: | 241 | P37666 | 242 |
| NAD(P)+ ↔ | 948074 | | | |
| hydroxypyruvate + | | | | |
| NAD(P)H + H+ | | | | |
| pyruvate + L-serine ↔ | Gene ID: | 243 | P21549 | 244 |
| L-alanine + | 189, | | | |
| hydroxypyruvate | CCDS2543.1 | | | |
| 3-phospho-D-glycerate + | GeneID: | 245 | P00634 | 246 |
| H2O → D-glycerate + | 945041 | | | |
| phosphate | | | | |
| 2-phospho-D-glycerate + | GeneID: | 245 | P00634 | 246 |
| H2O → D-glycerate + | 945041 | | | |
| phosphate | | | | |
| D-glycerate + ATP ↔ | GeneID: | 247 | Q944I4 | 248 |
| 3-phospho-D-glycerate + | 844378, | | | |
| ADP + H+ | mRNA NM_179581.2 | | | |
| D-glycerate + ATP ↔ | GeneID: | 249 | P77364 | 250 |
| 2-phospho-D-glycerate + | 945129 | | | |
| ADP + H+ | | | | |
| D-glycerate + ATP ↔ | GeneID: | 251 | P23524 | 252 |
| 2-phospho-D-glycerate + | 947632 | | | |
| ADP + H+ | | | | |

### Glycolaldehyde Reductase (EC 1.1.1.77)

[0185] The present disclosure describes enzymes that can catalyze the following reversible reactions:

ethylene glycol+NAD+⇄glycolaldehyde+NADH+H+

(S)-propane-1,2-diol+NAD+⇄(S)-lactaldehyde+NADH+H+

[0186] Glycolaldehyde reductase may also be known as lactaldehyde reductase, propanediol oxidoreductase, (R) [or(S)]-propane-1,2-diol:NAD+ oxidoreductase or L-1,2-propanediol oxidoreductase.

[0187] Thus, in some embodiments, the disclosure provides for an enzyme that plays roles in the ethylene glycol degradation pathway, the super pathway of glycol metabolism and degradation, the anaerobic L-lactaldehyde degradation pathway and/or the super pathway of fucose and rhamnose degradation. In one embodiment, the enzyme may use Fe²⁺ as a cofactor.

[0188] L-1,2-propanediol oxidoreductase is an iron-dependent group III dehydrogenase. It anaerobically reduces L-lactaldehyde, a product of both the L-fucose and L-rhamnose catabolic pathways, to L-1,2-propanediol, which is then excreted from the cell.

[0189] Crystal structures of the enzyme have been solved, showing a domain-swapped dimer in which the metal, cofactor and substrate binding sites could be located. An aspartate and three conserved histidine residues are required for Fe²⁺ binding and enzymatic activity.

[0190] In vitro, the enzyme can be reactivated by high concentrations of NAD+ and efficiently inactivated by a mixture of Fe³⁺ and ascorbate or Fe²⁺ and H₂O₂. Metal-catalyzed oxidation of the conserved His277 residue is proposed to be the cause of the inactivation.

[0191] Expression of FucO enables engineered one-turn reversal of the β-oxidation cycle. FucO activity contributes to the conversion of isobutyraldehyde to isobutanol in an engineered strain.

[0192] In particular embodiments, the enzyme converts glycolaldehyde to MEG. In some embodiments, the glycolaldehyde reductase is from Escherichia coli. In some embodiments, the glycolaldehyde reductase is encoded by the fucO gene.

[0193] In one embodiment, the glycolaldehyde reductase is encoded by one or more nucleic acid molecules obtained from a microorganism selected from E. coli and S. cerevisiae. In another embodiment, the one or more nucleic acid molecules is selected from gldA, GRE2, GRE3, yqhD, ydjG, fucO, yafB (dkgB), and/or yqhE (dkgA), or homolog thereof. In another embodiment, the one or more nucleic acid molecules is yqhD. In some embodiments, the yqhD comprises a G149E mutation. In a further embodiment, the glycolaldehyde reductase comprises an amino acid sequence selected from the group consisting of SEQ ID NOs: 13, 15, 17, 20, 23, 25, 28, 30 and 32. In yet a further embodiment, the glycolaldehyde reductase is encoded by a nucleic acid sequence selected from the group consisting of SEQ ID NOs: 12, 14, 16, 18, 19, 21, 22, 24, 26, 27, 29 and 31.

[0194] In some embodiments, a recombinant microorganism producing glycolic acid comprises a deletion, insertion, or loss of function mutation in a gene encoding an enzyme having glycolaldehyde reductase activity to prevent the conversion of glycolaldehyde to monoethyleneglycol (MEG) and instead shunt the reaction toward conversion of glycolaldehyde to glycolic acid (GA). In some embodiments, the enzyme having glycolaldehyde reductase activity is from Escherichia coli. In some embodiments, the enzyme having glycolaldehyde reductase activity is encoded by the fucO gene, or homolog thereof.

### Aldehyde Reductases

[0195] A number of aldehyde reductases may be used to convert glycolaldehyde to MEG.

[0196] An NADPH-dependent aldehyde reductase (YqhD) can catalyze the following reactions:

acetol+NADP+⇄methylglyoxal+NADPH+H+(reversible, EC1.1.1.-)

an alcohol+NADP+⇄an aldehyde+NADPH+H+(reversibility unspecified, EC 1.1.1.2)

an aldehyde+NADP++H2O→a carboxylate+NADPH+2H+(EC 1.2.1.4)

1,3-propanediol+NADP+⇄3-hydroxypropionaldehyde+NADPH+H+(reversibility unspecified, EC 1.1.1.-)

D-3,4-dihydroxybutanal+NADPH⇄1,3,4-butanetriol+NADP+(reversibility unspecified)

[0197] YqhD is an NADPH-dependent aldehyde reductase that may be involved in glyoxal detoxification and/or be part of a glutathione-independent response to lipid peroxidation.

[0198] It has been reported that various alcohols, aldehydes, amino acids, sugars and α-hydroxy acids have been tested as substrates for YqhD. The purified protein only shows NADP-dependent alcohol dehydrogenase activity, with a preference for alcohols longer than C(3), but with Km values in the millimolar range, suggesting that they are not the physiological substrates. In contrast, YqhD does exhibit short-chain aldehyde reductase activity with substrates such as propanaldehyde, acetaldehyde, and butanaldehyde, as well as acrolein and malondialdehyde. In a metabolically engineered strain, phenylacetaldehyde and 4-hydroxyphenylacetaldehyde are reduced to 2-phenylethanol and 2-(4-hydroxyphenyl)ethanol by the endogenous aldehyde reductases YqhD, YjgB, and YahK.

[0199] Overexpression of YqhD increases 1,3-propanediol oxidoreductase activity of the cell. E. coli has been engineered to express YqhD for the industrial production of 1,3-propanediol. YqhD activity contributes to the production of isobutanol, 1,2-propanediol, 1,2,4-butanetriol and acetol as well. Mutation of yqhD enables production of butanol by an engineered one-turn reversal of the β-oxidation cycle.

[0200] YqhD has furfural reductase activity, which appears to cause growth inhibition due to depletion of NADPH in metabolically engineered strains that produce alcohol from lignocellulosic biomass.

[0201] The crystal structure of YqhD has been solved at 2 Å resolution. YqhD is an asymmetric dimer of dimers, and the active site contains a Zn²⁺ ion. The NADPH cofactor is modified by hydroxyl groups at positions 5 and 6 in the nicotinamide ring.

[0202] Overexpression of yqhD leads to increased resistance to reactive oxygen-generating compounds such as hydrogen peroxide, paraquat, chromate and potassium tellurite. A yqhD deletion mutant shows increased sensitivity to these compounds and to glyoxal, and contains increased levels of reactive aldehydes that are generated during lipid peroxidation. Conversely, yqhD deletion leads to increased furfural tolerance.

[0203] In particular embodiments, an NADPH-dependent aldehyde reductase converts glycolaldehyde to MEG. In some embodiments, the NADPH-dependent aldehyde reductase is from Escherichia coli. In some embodiments, the NADPH-dependent aldehyde reductase is encoded by the yqhD gene.

[0204] A multi-functional methylglyoxal reductase (DkgA) can catalyze the following reactions:

acetol+NADP+⇄methylglyoxal+NADPH+H+(the reaction is physiologically favored in the opposite direction, EC 1.1.1.-)

isobutanol+NADP+⇄isobutanal+NADPH+H+(reversibility unspecified, EC 1.1.1.-)

ethyl-(2R)-methyl-(3S)-hydroxybutanoate+NADP+⇄ethyl-2-methylacetoacetate+NADPH+H+(reversibility unspecified, EC 1.1.1.-)

2-keto-L-gulonate+NADP+←2,5-didehydro-D-gluconate+NADPH+H+(the reaction is favored in the opposite direction, EC 1.1.1.346)

[0205] DkgA (YqhE) belongs to the aldo-keto reductase (AKR) family and has been shown to have methylglyoxal reductase and beta-keto ester reductase activity.

[0206] dkgA is reported to encode a 2,5-diketo-D-gluconate reductase (25DKGR) A, one of two 25DKG reductases in E. coli. The enzyme uses NADPH as the preferred electron donor and is thought to be involved in ketogluconate metabolism. The specific activity of the enzyme towards 2,5-diketo-D-gluconate is reported to be almost 1000-fold lower than its activity towards methylglyoxal.

[0207] Due to its low Km for NADPH, reduction of furans by DkgA may deplete NADPH pools and thereby limit cellular biosynthesis. A broad survey of aldehyde reductases showed that DkgA was one of several endogenous aldehyde reductases that contribute to the degradation of desired aldehyde end products of metabolic engineering.

[0208] A crystal structure of DkgA has been solved at 2.16 Å resolution.

[0209] In particular embodiments, a multi-functional methylglyoxal reductase converts glycolaldehyde to MEG. In some embodiments, the multi-functional methylglyoxal reductase is from Escherichia coli. In some embodiments, the multi-functional methylglyoxal reductase is encoded by the dkgA gene.

[0210] A multi-functional methylglyoxal reductase (DkgB) can catalyze the following reactions:

acetol+NADP+⇄methylglyoxal+NADPH+H+(the reaction is physiologically favored in the opposite direction, EC 1.1.1.-)

4-nitrobenzyl alcohol+NADP+⇄4-nitrobenzaldehyde+NADPH+H+(reversibility unspecified, EC 1.1.1.91)

2-keto-L-gulonate+NADP+←2,5-didehydro-D-gluconate+NADPH+H+(the reaction is favored in the opposite direction, EC 1.1.1.346)

[0211] DkgB (YafB) is a member of the aldo-keto reductase (AKR) subfamily 3F. DkgB was shown to have 2,5-diketo-D-gluconate reductase, methylglyoxal reductase and 4-nitrobenzaldehyde reductase activities.

[0212] dkgB is reported to encode 2,5-diketo-D-gluconate reductase (25DKGR) B, one of two 25DKG reductases in E. coli. The enzyme uses NADPH as the preferred electron donor and is thought to be involved in ketogluconate metabolism. However, the specific activity of the enzyme towards 2,5-diketo-D-gluconate is reported to be almost 1000-fold lower than its activity towards methylglyoxal.

[0213] In particular embodiments, a multi-functional methylglyoxal reductase converts glycolaldehyde to MEG. In some embodiments, the multi-functional methylglyoxal reductase is from Escherichia coli. In some embodiments, the multi-functional methylglyoxal reductase is encoded by the dkgB gene.

[0214] A methylglyoxal reductase (YeaE) can catalyze the following reaction:

acetol+NADP+⇄methylglyoxal+NADPH+H+(the reaction is physiologically favored in the opposite direction, EC 1.1.1.-)

[0215] YeaE has been shown to have methylglyoxal reductase activity.

[0216] The subunit structure of YeaE has not been determined, but its amino acid sequence similarity to the aldo-keto reductases DkgA (YqhE) and DkgB (YafB) suggests that it may be monomeric.

[0217] In particular embodiments, a methylglyoxal reductase converts glycolaldehyde to MEG. In some embodiments, the methylglyoxal reductase is from Escherichia coli. In some embodiments, the methylglyoxal reductase is encoded by the yeaE gene.

[0218] A L-glyceraldehyde 3-phosphate reductase (yghZ) can catalyze the following reactions:

L-glyceraldehyde 3-phosphate+NADPH+H+→sn-glycerol 3-phosphate+NADP+(EC 1.1.1.-)

acetol+NADP+⇄methylglyoxal+NADPH+H+(the reaction is physiologically favored in the opposite direction, EC 1.1.1.-)

[0219] YghZ is an L-glyceraldehyde 3-phosphate (L-GAP) reductase. The enzyme is also able to detoxify methylglyoxal at a low rate. YghZ defines the AKR14 (aldo-keto reductase 14) protein family.

[0220] L-GAP is not a natural metabolite and is toxic to E. coli. L-GAP is a substrate of both the glycerol-3-phosphate and hexose phosphate transport systems of E. coli K-12. It has been postulated that the physiological role of YghZ is the detoxification of L-GAP, which may be formed by non-enzymatic racemization of GAP or by an unknown cellular process.

[0221] The crystal structure of the E. coli enzyme has been determined and is suggested to be a tetramer. However, others have found that the protein forms an octamer based on gel filtration and electron microscopy studies.

[0222] In particular embodiments, a L-glyceraldehyde 3-phosphate reductase converts glycolaldehyde to MEG. In some embodiments, the L-glyceraldehyde 3-phosphate reductase is from Escherichia coli. In some embodiments, the L-glyceraldehyde 3-phosphate reductase is encoded by the yghZ gene.

[0223] An L-1,2-propanediol dehydrogenase/glycerol dehydrogenase (GldA) can catalyze the following reactions:

(S)-propane-1,2-diol+NAD+⇄acetol+NADH+H+(reversible reaction)

aminoacetone+NADH+H+→(R)-1-aminopropan-2-ol+NAD+(EC 1.1.1.75)

glycerol+NAD+⇄dihydroxyacetone+NADH+H+(reversible reaction, EC 1.1.1.6)

[0224] The physiological function of the GldA enzyme has long been unclear. The enzyme was independently isolated as a glycerol dehydrogenase and a D-1-amino-2-propanol:NAD+ oxidoreductase. At that time, D-1-amino-2-propanol was thought to be an intermediate for the biosynthesis of vitamin B12, and although E. coli is unable to synthesize vitamin B12 de novo, enzymes catalyzing the synthesis of this compound were sought. It was later found that GldA was responsible for both activities.

[0225] The primary in vivo role of GldA was recently proposed to be the removal of dihydroxyacetone by converting it to glycerol. However, a dual role in the fermentation of glycerol has also recently been established. Glycerol dissimilation in E. coli can be accomplished by two different pathways. The glycerol and glycerophosphodiester degradation pathway requires the presence of a terminal electron acceptor and utilizes an ATP-dependent kinase of the Glp system, which phosphorylates glycerol to glycerol-3-phosphate. However, upon inactivation of the kinase and selection for growth on glycerol, it was found that an NAD+-linked dehydrogenase, GldA, was able to support glycerol fermentation. Recently, it was shown that GldA was involved in glycerol fermentation both as a glycerol dehydrogenase, producing dihydroxyacetone, and as a 1,2-propanediol dehydrogenase, regenerating NAD+ by producing 1,2-propanediol from acetol.

[0226] The enzyme is found in two catalytically active forms, a large form of eight subunits and a small form of two subunits. The large form appears to be the major species.

[0227] In particular embodiments, an L-1,2-propanediol dehydrogenase/glycerol dehydrogenase converts glycolaldehyde to MEG. In some embodiments, the L-1,2-propanediol dehydrogenase/glycerol dehydrogenase is from Escherichia coli. In some embodiments, the L-1,2-propanediol dehydrogenase/glycerol dehydrogenase is encoded by the gldA gene.

[0228] An NADPH-dependent methylglyoxal reductase (GRE2) from Saccharomyces cerevisiae can catalyze the following reactions:

(S)-lactaldehyde+NADP⁺⇄methylglyoxal+NADPH

3-methylbutanol+NAD(P)⁺⇄3-methylbutanal+NAD(P)H

[0229] Gre2 is a versatile enzyme that catalyzes the stereoselective reduction of a broad range of substrates including aliphatic and aromatic ketones, diketones, as well as aldehydes, using NADPH as the cofactor.

[0230] The crystal structures of Gre2 from S. cerevisiae in an apo-form at 2.00 Å and NADPH-complexed form at 2.40 Å resolution have been solved. Gre2 forms a homodimer, each subunit of which contains an N-terminal Rossmann-fold domain and a variable C-terminal domain, which participates in substrate recognition. The induced fit upon binding to the cofactor NADPH makes the two domains shift toward each other, producing an interdomain cleft that better fits the substrate. Computational simulation combined with site-directed mutagenesis and enzymatic activity analysis enabled characterization of a potential substrate-binding pocket that determines the stringent substrate stereoselectivity for catalysis.

[0231] Gre2 catalyzes the irreversible reduction of the cytotoxic compound methylglyoxal (MG) to (S)-lactaldehyde as an alternative to detoxification of MG by glyoxalase I GLO1. MG is synthesized via a bypath of glycolysis from dihydroxyacetone phosphate and is believed to play a role in cell cycle regulation and stress adaptation. GRE2 also catalyzes the reduction of isovaleraldehyde to isoamylalcohol. The enzyme serves to suppress isoamylalcohol-induced filamentation by modulating the levels of isovaleraldehyde, the signal to which cells respond by filamentation. GRE2 is also involved in ergosterol metabolism.

[0232] In particular embodiments, an NADPH-dependent methylglyoxal reductase converts glycolaldehyde to MEG. In some embodiments, the NADPH-dependent methylglyoxal reductase is from S. cerevisiae. In some embodiments, the NADPH-dependent methylglyoxal reductase is encoded by the GRE2 gene.

### Thiolase/Acetyl Coenzyme a Acetyltransferase (EC 2.3.1.9)

[0233] The present disclosure describes enzymes that can catalyze the following reaction:

2acetyl-CoA⇄acetoacetyl-CoA+coenzyme A (reversible reaction)

[0234] Thiolase/Acetyl coenzyme A acetyltransferase may also be known as acetyl-CoA-C-acetyltransferase, acetoacetyl-CoA thiolase, acetyl-CoA:acetyl-CoA C-acetyltransferase or thiolase II.

[0235] Thus, in some embodiments, the disclosure provides for an enzyme that plays a role in acetoacetate degradation (to acetyl CoA). In one embodiment, an inhibitor of this enzyme may be acetoacetyl-CoA.

[0236] In particular embodiments, the enzyme converts acetyl-CoA to acetoacetyl-CoA. In one embodiment, the thiolase or acetyl coenzyme A acetyltransferase is encoded by one or more nucleic acid molecules obtained from a microorganism selected from the group consisting of Clostridium sp., Bacillus sp., E. coli, Saccharomyces sp. and Marinobacter sp. In some embodiments, the thiolase or acetyl coenzyme A acetyltransferase is encoded by one or more nucleic acid molecules obtained from a microorganism selected from the group consisting of Clostridium acetobutylicum, Clostridium thermosaccharolyticum, Bacillus cereus, E. coli, Saccharomyces cerevisiae and Marinobacter hydrocarbonoclasticus. In some embodiments, the one or more nucleic acid molecules is thlA, atoB and/or ERG10, or homolog thereof. In a further embodiment, the thiolase or acetyl coenzyme A acetyltransferase comprises an amino acid sequence selected from the group consisting of SEQ ID NOs: 35, 37 and 40. In yet a further embodiment, the thiolase or acetyl coenzyme A acetyltransferase is encoded by a nucleic acid sequence selected from the group consisting of SEQ ID NOs: 33, 34, 36, 38 and 39.

### Acetyl-CoA:Acetoacetate-CoA Transferase (EC 2.8.3.-)

[0237] The present disclosure describes enzymes that can catalyze the following reaction:

acetoacetate+acetyl-CoA⇄acetoacetyl-CoA+acetate (reversible reaction, EC2.8.3.-)

[0238] Acetyl-CoA:acetoacetate-CoA transferase may also be known as acetate:acetoacetyl-CoA transferase or acetoacetyl-CoA transferase.

[0239] Thus, in some embodiments, the disclosure provides for an enzyme that plays a role in acetoacetate degradation (to acetyl CoA). In one embodiment, inhibitors of this enzyme may include acetyl-CoA and coenzyme A.

[0240] The growth of E. coli on short-chain fatty acids (C3-C6) requires the activation of the acids to their respective thioesters. This activation is catalyzed by acetoacetyl-CoA transferase. The reaction takes place in two half-reactions which involves a covalent enzyme-CoA. The enzyme undergoes two detectable conformational changes during the reaction. It is thought likely that the reaction proceeds by a ping-pong mechanism. The enzyme can utilize a variety of short-chain acyl-CoA and carboxylic acid substrates but exhibits maximal activity with normal and 3-keto substrates.

[0241] In particular embodiments, the enzyme converts acetoacetyl-CoA to acetoacetate. In some embodiments, the acetyl-CoA:acetoacetate-CoA transferase is from Clostridium spp. In some embodiments, the acetyl-CoA:acetoacetate-CoA transferase is from Clostridium acetobutylicum. In some embodiments, the acetyl-CoA:acetoacetate-CoA transferase is from Escherichia coli. In some embodiments, the acetyl-CoA:acetoacetate-CoA transferase is encoded by the atoA and atoD genes. In another embodiment, the subunit composition of acetoacetyl-CoA transferase is [(AtoA)₂][(AtoD)₂], with (AtoA)₂ being the β complex and (AtoD)₂ being the α complex. In one embodiment, the acetyl-CoA:acetoacetate-CoA transferase is a fused acetyl-CoA:acetoacetate-CoA transferase: α subunit/β subunit. In another embodiment, the acetyl-CoA:acetoacetate-CoA transferase is encoded by the ydiF gene.

### Acetate:Acetoacetyl-CoA Hydrolase (EC 3.1.2.11)

[0242] The present disclosure describes enzymes that can catalyze the following reaction:

acetoacetyl-CoA+H₂O⇄CoA+acetoacetate

[0243] Acetoacetyl-CoA hydrolase may also be known as acetoacetyl coenzyme A hydrolase, acetoacetyl CoA deacylase or acetoacetyl coenzyme A deacylase.

[0244] This enzyme belongs to the family of hydrolases, specifically those acting on thioester bonds.

[0245] In particular embodiments, the enzyme converts acetoacetyl-CoA to acetoacetate. In some embodiments, the acetate:acetoacetyl-CoA hydrolase is from Clostridium spp. In some embodiments, the acetate:acetoacetyl-CoA hydrolase is from Clostridium acetobutylicum. In another embodiment, the Acetoacetyl-CoA hydrolase is encoded by the ctfA (subunit A) and/or ctfB (subunit B) genes.

[0246] In a further embodiment, the acetyl-CoA:acetoacetate-CoA transferase or acetate:acetoacetyl-CoA hydrolase comprises an amino acid sequence selected from the group consisting of SEQ ID NOs: 43, 46, 97, 99, 101 and 103. In yet a further embodiment, the acetyl-CoA:acetoacetate-CoA transferase or acetate:acetoacetyl-CoA hydrolase is encoded by a nucleic acid sequence selected from the group consisting of SEQ ID NOs: 41, 42, 44, 45, 96, 98, 100 and 102.

### Acetoacetate Decarboxylase (EC 4.1.1.4)

[0247] The present disclosure describes enzymes that can catalyze the following reaction:

acetoacetate+H+→acetone+CO₂

[0248] Acetoacetate decarboxylase may also be known as ADC, AADC or acetoacetate carboxy-lyase.

[0249] Thus, in some embodiments, the disclosure provides for an enzyme that plays roles in isopropanol biosynthesis, pyruvate fermentation to acetone, the super pathway of Clostridium acetobutylicum acidogenic and solventogenic fermentation and/or the super pathway of Clostridium acetobutylicum solventogenic fermentation.

[0250] Acetoacetate decarboxylase (ADC) plays a key role in solvent production in Clostridium acetobutylicum. During the acidogenic phase of growth, acids accumulate causing a metabolic shift to solvent production. In this phase acids are re-assimilated and metabolized to produce acetone, butanol and ethanol.

[0251] Preliminary purification and crystallization of the enzyme has revealed that a lysine residue is implicated in the active site. The enzyme is a large complex composed of 12 copies of a single type of subunit.

[0252] The enzyme of Clostridium acetobutylicum ATCC 824 has been purified and the adc gene encoding it cloned. The enzyme has also been purified from the related strain Clostridium acetobutylicum DSM 792 and the gene cloned and sequenced. The decarboxylation reaction proceeds by the formation of a Schiff base intermediate.

[0253] ADC is a key enzyme in acid uptake, effectively pulling the CoA-transferase reaction in the direction of acetoacetate formation.

[0254] In particular embodiments, the enzyme converts acetoacetate to acetone. In one embodiment, the acetoacetate decarboxylase is encoded by one or more nucleic acid molecules obtained from a microorganism selected from the group consisting of Clostridium sp., Bacillus sp., Chromobacterium sp. and Pseudomonas sp. In another embodiment, the acetoacetate decarboxylase is encoded by one or more nucleic acid molecules obtained from a microorganism selected from the group consisting of Clostridium acetobutylicum, Clostridium beijerinckii, Clostridium cellulolyticum, Bacillus polymyxa, Chromobacterium violaceum and Pseudomonas putida. In some embodiments, the one or more nucleic acid molecules encoding the acetoacetate decarboxylase is adc, or homolog thereof. In a further embodiment, the acetoacetate decarboxylase comprises an amino acid sequence selected from the group consisting of SEQ ID NOs: 49 and 52. In yet another embodiment, the acetoacetate decarboxylase is encoded by a nucleic acid sequence selected from the group consisting of SEQ ID NOs: 47, 48, 50 and 51.

### Alcohol Dehydrocienase (EC 1.1.1.-)

[0255] The present disclosure describes enzymes that can catalyze the reversible oxidation of primary or secondary alcohols to aldehydes or ketones, respectively. In one embodiment, the enzyme is a secondary alcohol dehydrogenase (S-ADH) and catalyzes the reduction of ketones such as acetone into secondary alcohols such as 2-propanol (isopropanol).

[0256] In some embodiments the S-ADH is from Burkholderia sp. In some embodiments, the S-ADH is from Burkholderia sp. AIU 652. In some embodiments, the S-ADH is from Alcaligenes sp. In some embodiments, the S-ADH is from Alcaligenes eutrophus. In some embodiments, the S-ADH is from Clostridium sp. In some embodiments, the S-ADH is from Clostridium ragsdalei. In some embodiments, the S-ADH is from Clostridium beijerinckii. In some embodiments, the S-ADH is from Thermoanaerobacter sp. In some embodiments, the S-ADH is from Thermoanaerobacter brockii. In some embodiments, the S-ADH is from Thermoanaerobacter ethanolicus (Clostridium thermohydrosulfuricum). In some embodiments, the S-ADH is encoded by the adhB gene. In some embodiments, the S-ADH is from the trypanosomatid Phytomonas sp. In some embodiments, the S-ADH is from Rhodococcus sp. In some embodiments, the S-ADH is from Rhodococcus ruber. In some embodiments, the S-ADH is from Methanobacterium palustre. In some embodiments, the S-ADH is from methanogenic archaea Methanogenium liminatans. In some embodiments, the S-ADH is from the parasitic protist Entamoeba histolytica (EhAdh1). In some embodiments, the S-ADH is from parasitic protozoan Tritrichomonas foetus. In some embodiments, the S-ADH is from human parasite Trichomonas vaginalis.

[0257] In some embodiments, the S-ADH is predicted from homology and can be from Thermoanaerobacter mathranii, Micrococcus luteus, Nocardiopsis alba, Mycobacterium hassiacum, Helicobacter suis, Candida albicans, Candida parapsilosis, Candida orthopsilosis, Candida metapsilosis, Grosmannia clavigera and Scheffersomyces stipitis.

[0258] In some embodiments, the alcohol dehydrogenase has at least 70% sequence identity, at least 80% sequence identity, or at least 90% sequence identity with an alcohol dehydrogenase from Clostridium sp. In other embodiments, the alcohol dehydrogenase is an alcohol dehydrogenase selected from Clostridium beijerinckii adh and Clostridium carboxidivorans adh. In a further embodiment, the alcohol dehydrogenase comprises an amino acid sequence selected from the group consisting of SEQ ID NOs: 138 and 140. In yet another embodiment, the alcohol dehydrogenase is encoded by a nucleic acid sequence selected from the group consisting of SEQ ID NOs: 136, 137, and 139.

### Dehydratase (EC 4.2.1.-)

[0259] The present disclosure describes enzymes that can catalyze the following reactions:

isopropanol⇄propene+H₂O

### D-Xylose Isomerase (EC 5.3.1.5)

[0260] The present disclosure describes enzymes that can catalyze the following reversible reaction:

D-xylopyranose⇄D-xylulose

[0261] D-xylose isomerase may also be known as xylose isomerase or D-xylose ketol-isomerase.

[0262] Thus, in some embodiments, the disclosure provides for an enzyme that plays a role in xylose degradation.

[0263] Xylose isomerase catalyzes the first reaction in the catabolism of D-xylose.

[0264] Two conserved histidine residues, H101 and H271, were shown to be essential for catalytic activity. The fluorescence of two conserved tryptophan residues, W49 and W188, is quenched during binding of xylose, and W49 was shown to be essential for catalytic activity. The presence of Mg²⁺, Mn²⁺ or Co²⁺ protects the enzyme from thermal denaturation.

[0265] The subunit composition has not been established experimentally.

[0266] In particular embodiments, the enzyme converts D-xylose to D-xylulose. In one embodiment, the recombinant microorganism further comprises an endogenous or exogenous xylose isomerase that catalyzes the conversion of D-xylose to D-xylulose. In one embodiment, the xylose isomerase is exogenous. In another embodiment, the xylose isomerase is encoded by one or more nucleic acid molecules obtained from Pyromyces sp or E. coli. In another embodiment, the one or more nucleic acid molecules encoding the xylose isomerase is xylA, or homolog thereof. In yet another embodiment, the one or more nucleic acid molecules encoding the xylose isomerase comprises an amino acid sequence selected from SEQ ID NOs: 95 and 144. In a further embodiment, the one or more nucleic acid molecules encoding the xylose isomerase is encoded by a nucleic acid sequence selected from the group consisting of SEQ ID NOs: 93, 94 and 143.

[0267] In some embodiments, a recombinant microorganism producing MEG or GA, or optionally, MEG or GA and one or more co-product, comprises a deletion, insertion, or loss of function mutation in a gene encoding a D-xylose isomerase to prevent conversion of D-xylose to D-xylulose and instead shunt the reaction toward the conversion of D-xylose to D-xylonate.

### D-Xylulose 5-Kinase/Xylulokinase

[0268] The present disclosure describes enzymes that can catalyze the following reactions:

D-xylulose+ATP→D-xylulose 5-phosphate+ADP+H+(EC2.7.1.17)

ATP+1-deoxy-D-xylulose-1-deoxy-D-xylulose 5-phosphate+ADP+H+(EC2.7.1.-)

[0269] D-xylulose 5-kinase may also be known as xylulose kinase or xylulokinase.

[0270] Xylulokinase catalyzes the phosphorylation of D-xylulose, the second step in the xylose degradation pathway, producing D-xylulose-5-phosphate, an intermediate of the pentose phosphate pathway.

[0271] In the absence of substrate, xylulokinase has weak ATPase activity. Xylulokinase can also catalyze the phosphorylation of 1-deoxy-D-xylulose. This would allow a potential salvage pathway for generating 1-deoxy-D-xylulose 5-phosphate for use in the biosynthesis of terpenoids, thiamine and pyridoxal. The rate of phosphorylation of 1-deoxy-D-xylulose is 32-fold lower than the rate of phosphorylation of D-xylulose.

[0272] The kinetic mechanism of the bacterial enzyme has been studied, suggesting a predominantly ordered reaction mechanism. The enzyme undergoes significant conformational changes upon binding of the substrate and of ATP. Two conserved aspartate residues, D6 and D233, were found to be essential for catalytic activity, and a catalytic mechanism has been proposed.

[0273] Crystal structures of bacterial xylulokinase in the apo form and bound to D-xylulose have been determined at 2.7 and 2.1 Å resolution, respectively.

[0274] In particular embodiments, the enzyme converts D-xylulose to D-xylulose-5-phosphate. In some embodiments, the D-xylulose 5-kinase is from Escherichia coli. In some embodiments, the D-xylulose 5-kinase is encoded by the xylB gene. In some embodiments, the D-xylulose 5-kinase is from Saccharomyces cerevisiae. In some embodiments the D-xylulose 5-kinase is encoded by the XKS1 gene. In some embodiments, the D-xylulose 5-kinase is from Pichia stipitis. In some embodiments the D-xylulose 5-kinase is encoded by the XYL3 gene.

[0275] In some embodiments, the D-xylulose 5-kinase is encoded by an amino acid sequence having at least 70% sequence identity to xylB from E. coli. In a further embodiment, the D-xylulose 5-kinase is encoded by an amino acid sequence having at least 80% sequence identity to xylB from E. coli. In yet a further embodiment, the D-xylulose 5-kinase is encoded by an amino acid sequence having at least 90% sequence identity to xylB from E. coli. In other embodiments, the D-xylulose 5-kinase is xylB from E. coli.

[0276] In one embodiment, the D-xylulose 5-kinase is encoded by one or more nucleic acid molecules obtained from E. coli. In some embodiments, the one or more nucleic acid molecules encoding the D-xylulose 5-kinase is xylB, or homolog thereof. In another embodiment, the one or more nucleic acid molecules encoding the D-xylulose 5-kinase comprises an amino acid sequence set forth in SEQ ID NO: 146. In a further embodiment, the one or more nucleic acid molecules encoding the D-xylulose 5-kinase is encoded by a nucleic acid sequence set forth in SEQ ID NO: 145.

[0277] In some embodiments, a ribulokinase enzyme catalyzes the phosphorylation of D-ribulose to D-ribulose-5-phosphate. In some embodiments, the ribulokinase enzyme is encoded by E. Coli AraB. In some embodiments, the ribulokinase enzyme is encoded by a nucleic acid sequence having at least 70% sequence identity, at least 80% sequence identity, or at least 90% sequence identity to AraB from E. coli (SEQ ID NO: 288).

[0278] In some embodiments, a ribokinase enzyme catalyzes the phosphorylation of D-ribose to D-ribose-5-phosphate. In some embodiments, the ribokinase enzyme is encoded by E. Coli rbsK. In some embodiments, the ribulokinase enzyme is encoded by a nucleic acid sequence having at least 70% sequence identity, at least 80% sequence identity, or at least 90% sequence identity to rbsK from E. coli (SEQ ID NO: 290).

[0279] In some embodiments, a xylulokinase enzyme catalyzes the phosphorylation of D-xylulose to D-xylulose-5-phosphate. In some embodiments, the ribokinase enzyme is encoded by T. maritima XuK. In some embodiments, the ribulokinase enzyme is encoded by a nucleic acid sequence having at least 70% sequence identity, at least 80% sequence identity, or at least 90% sequence identity to XuK from T. maritima (SEQ ID NO: 291).

### Glycolaldehyde Dehydrogenase (1.2.1.21)

[0280] The present disclosure describes enzymes that can catalyze the following reaction:

glycolaldehyde+NAD⁺+H₂O [symbol] glycolate+NADH+2H⁺

[0281] This enzyme belongs to the family of oxidoreductases, specifically those acting on the aldehyde or oxo group of donor with NAD+ or NADP+ as acceptor. This enzyme participates in glyoxylate and dicarboxylate metabolism.

[0282] Glycolaldehyde dehydrogenase may also be known as glycolaldehyde:NAD+ oxidoreductase or glycol aldehyde dehydrogenase.

[0283] In E. coli aldehyde dehydrogenase A (AldA) is an enzyme of relatively broad substrate specificity for small α-hydroxyaldehyde substrates. It is thus utilized in several metabolic pathways.

[0284] L-fucose and L-rhamnose are metabolized through parallel pathways which converge after their corresponding aldolase reactions yielding the same products: dihydoxy-acetone phosphate and L-lactaldehyde. Aerobically, aldehyde dehydrogenase A oxidizes L-lactaldehyde to L-lactate.

[0285] In parallel pathways utilizing the same enzymes, D-arabinose and L-xylose can be metabolized to dihydoxy-acetone phosphate and glycolaldehyde, which is oxidized to glycolate by aldehyde dehydrogenase A.

[0286] Crystal structures of the enzyme alone and in ternary and binary complexes have been solved.

[0287] Aldehyde dehydrogenase A is only present under aerobic conditions and is most highly induced by the presence of fucose, rhamnose or glutamate. The enzyme is inhibited by NADH, which may act as a switch to shift from oxidation of lactaldehyde to its reduction by propanediol oxidoreductase. AldA is upregulated during short-term adaptation to glucose limitation.

[0288] Based on sequence similarity, AldA was predicted to be a succinate-semialdehyde dehydrogenase.

[0289] Regulation of aldA expression has been investigated. The gene is regulated by catabolite repression, repression under anaerobic conditions via ArcA, and induction by the carbon source.

[0290] In particular embodiments, the enzyme converts glycolaldehyde to glycolate. In some embodiments, the glycolaldehyde dehydrogenase is from Escherichia coli. In some embodiments, the glycolaldehyde dehydrogenase is encoded by the aldA gene.

[0291] In some embodiments, a recombinant microorganism producing MEG or glycolic acid, or MEG and one or more co-product, comprises a deletion, insertion, or loss of function mutation in a gene encoding a glycolaldehyde dehydrogenase to prevent the production of glycolic acid from glycolaldehyde and instead shunt the reaction toward conversion of glycolaldehyde to MEG. In some embodiments, the deletion, disruption, mutation, and/or reduction in the activity of a glycolaldehyde dehydrogenase that catalyzes the conversion of glycolaldehyde to glycolic acid is partial, wherein an amount of glycolic acid is still produced.

[0292] In other embodiments, a recombinant microorganism producing glycolic acid comprises or expresses at least one nucleic acid molecule encoding a glycolaldehyde dehydrogenase.

### Lactate Dehydrogenase (1.1.1.28)

[0293] The present disclosure describes enzymes that can catalyze the following reaction:

(R)-lactate+NAD+←pyruvate+NADH+H+

[0294] Lactate dehydrogenase (LDH) is an enzyme found in nearly all living cells such as in animals, plants and prokaryotes. LDH catalyzes the conversion of lactate to pyruvic acid and back, as it converts NADH to NAD+ and back. A dehydrogenase is an enzyme that transfers a hydride from one molecule to another.

[0295] LDH exist in four distinct enzyme classes. The most common one is NAD(P)-dependent L-lactate dehydrogenase. Other LDHs act on D-lactate and/or are dependent on cytochrome c: D-lactate dehydrogenase (cytochrome) and L-lactate dehydrogenase (cytochrome).

[0296] LDH has been of medical significance because it is found extensively in body tissues, such as blood cells and heart muscle. Because it is released during tissue damage, it is a marker of common injuries and disease such as heart failure.

[0297] Lactate dehydrogenase may also be known as lactic acid dehydrogenase, (R)-lactate:NAD+ oxidoreductase or D-lactate dehydrogenase-fermentative.

[0298] In E. coli, lactate dehydrogenase (LdhA) is a soluble NAD-linked lactate dehydrogenase (LDH) that is specific for the production of D-lactate. LdhA is a homotetramer and shows positive homotropic cooperativity under higher pH conditions.

[0299] E. coli contains two other lactate dehydrogenases: D-lactate dehydrogenase and L-lactate dehydrogenase. Both are membrane-associated flavoproteins required for aerobic growth on lactate.

[0300] LdhA is present under aerobic conditions but is induced when E. coli is grown on a variety of sugars under anaerobic conditions at acidic pH. Unlike most of the genes involved in anaerobic respiration, IdhA is not activated by Fnr; rather the ArcAB system and several genes involved in the control of carbohydrate metabolism (csrAB and mlc) appear to regulate expression. The expression of IdhA is negatively affected by the transcriptional regulator ArcA. IdhA belongs to the σ32 regulon.

[0301] The IdhA gene is a frequent target for mutations in metabolic engineering, most often to eliminate production of undesirable fermentation side products, but also to specifically produce D-lactate.

[0302] In particular embodiments, the enzyme converts pyruvate to lactate. In some embodiments, the lactate dehydrogenase is from Escherichia coli. In some embodiments, the lactate dehydrogenase is encoded by the IdhA gene.

[0303] In some embodiments, a recombinant microorganism producing MEG or GA, or MEG and one or more co-product, comprises a deletion, insertion, or loss of function mutation in a gene encoding a lactate dehydrogenase to prevent the production of lactate from pyruvate and instead shunt the reaction toward production of one or more co-products.

### Soluble Pyridine Nucleotide Transhydrogenase (EC 1.6.1.1.)

[0304] The present disclosure describes enzymes that can catalyze the following reaction:

NADH+NADP+ [symbol] NAD++NADPH

[0305] Soluble pyridine nucleotide transhydrogenase may also be known as NAD(P)+ transhydrogenase (B-specific), STH, pyridine nucleotide transhydrogenase, or transhydrogenase.

[0306] E. coli contains both a soluble and a membrane-bound pyridine nucleotide transhydrogenase. The soluble pyridine nucleotide transhydrogenase is the sthA or udhA gene product; its primary physiological role appears to be the reoxidation of NADPH. The membrane-bound proton-translocating transhydrogenase is the pntAB gene product; PntAB is a major source of NADPH.

[0307] UdhA contains noncovalently bound FAD and is present in a form consisting of seven or eight monomers. Moderate overexpression of UdhA (SthA) allows an increased maximal growth rate of a phosphoglucose isomerase mutant, and a pgi sthA double mutant is not viable. These phenotypes may be due to the ability of UdhA to restore the cellular redox balance under conditions of excess NADPH formation. Mutations in sthA appear during adaptation of a pgi mutant strain to growth on glucose minimal medium. Transcription of sthA is downregulated by growth on glycerol.

[0308] In some embodiments, expression of a transhydrogenase can increase activity of a NADPH-dependent alcohol dehydrogenase, leading to improved acetone to 2-propanol conversion. In one embodiment, the soluble pyridine nucleotide transhydrogenase is encoded by one or more nucleic acid molecules obtained from E. coli. In another embodiment, the one or more nucleic acid molecules encoding the soluble pyridine nucleotide transhydrogenase is udhA, or homolog thereof. In some embodiments, the one or more nucleic acid molecules encoding the soluble pyridine nucleotide transhydrogenase comprises an amino acid sequence set forth in SEQ ID NO: 142. In some embodiments, the one or more nucleic acid molecules encoding the soluble pyridine nucleotide transhydrogenase is encoded by a nucleic acid sequence set forth in SEQ ID NO: 141.

### Hydroxymethylglutaryl-CoA Synthase (EC 2.3.3.-)

[0309] The present disclosure describes enzymes that can catalyze the following reaction:

acetoacetyl-CoA+acetyl-CoA+H₂O↔(S)-3-hydroxy-3-methylglutaryl-CoA+coenzyme A+H⁺

[0310] Hydroxymethylglutaryl-CoA synthase may also be known as (S)-3-hydroxy-3-methylglutaryl-CoA acetoacetyl-CoA-lyase (CoA-acetylating), 3-hydroxy-3-methylglutaryl CoA synthetase, 3-hydroxy-3-methylglutaryl coenzyme A synthase, 3-hydroxy-3-methylglutaryl coenzyme A synthetase, 3-hydroxy-3-methylglutaryl-CoA synthase, 3-hydroxy-3-methylglutaryl-coenzyme A synthase, β-hydroxy-β-methylglutaryl-CoA synthase, HMG-CoA synthase, acetoacetyl coenzyme A transacetase, hydroxymethylglutaryl coenzyme A synthase, and hydroxymethylglutaryl coenzyme A-condensing enzyme.

[0311] Hydroxymethylglutaryl-CoA synthase catalyzes the condensation of acetyl-CoA with acetoacetyl-CoA to form (S)-3-hydroxy-3-methylglutaryl-CoA, an early stage in the synthesis of (R)-mevalonate, a precursor of cholesterol.

[0312] The enzyme catalyzes a complex reaction that can be divided into four steps. The first step involves the formation of an enzyme acetyl-CoA binary complex, followed by the transfer of the acetyl group from the CoA thioester to a cysteine residue on the enzyme, forming a thioester acyl-enzyme intermediate. In the next step the now reduced CoA dissociates, and the second substrate, acetoacetyl-CoA, binds the enzyme. The third step involves the formation of a carbanion by removal of a proton from the methyl of the acetylcysteine. The activated acetylcysteine then undergoes a Claisen-like condensation with the γ-carbon of the acetoacetyl-CoA ligand, which forms the HMG-CoA while retaining the thioester bond to the enzyme. The last step comprises the hydrolysis of this bond, resulting in free HMG-CoA.

[0313] The HMGCS1 gene from Homo sapiens has been cloned and sequenced (Russ A P et al. (1992) Amplification and direct sequencing of a cDNA encoding human cytosolic 3-hydroxy-3-methylglutaryl-coenzyme A synthase. Biochim Biophys Acta 1132(3): 329-31). The gene was expressed in Escherichia coli, and the recombinant protein was purified and characterized (Rokosz L L et al. (1994) Human cytoplasmic 3-hydroxy-3-methylglutaryl coenzyme A synthase: expression, purification, and characterization of recombinant wild-type and Cys129 mutant enzymes. Arch Biochem Biophys 312(1): 1-13). The enzyme is a homodimer of 120 kDa. Catalysis proceeds by formation of a covalent acetyl-enzyme intermediate. Kinetic data suggest that the two substrates (acetyl-CoA and acetoacetyl-CoA) compete for binding to the same site.

[0314] In one embodiment, the hydroxymethylglutaryl-CoA synthase can have a 3-hydroxyisovalerate (3HIV) synthase activity and can catalyze the following reaction:

acetone+acetyl-CoA+H2O↔3-hydroxyisovalerate

[0315] In one embodiment, the 3HIV synthase is encoded by one or more nucleic acid molecules obtained from a microorganism selected from Mus sp., Saccharomyces sp., Lactobacillus sp. and Polaromonas sp. In another embodiment, the 3HIV synthase is encoded by one or more nucleic acid molecules obtained from a microorganism selected from Mus musculus, Saccharomyces cerevisiae, Lactobacillus crispatus and Polaromonas naphthalenivorans. In some embodiments, the one or more nucleic acid molecules encoding the 3HIV synthase is selected from Hmgcs1, ERG13, PksG and/or Pnap_0477, or homolog thereof. In a further embodiment, the one or more nucleic acid molecules encoding the 3HIV synthase comprises an amino acid sequence selected from the group consisting of SEQ ID NOs: 105, 107, 109 and 111. In yet another embodiment, the one or more nucleic acid molecules encoding the 3HIV synthase is encoded by a nucleic acid sequence selected from the group consisting of SEQ ID NOs: 104, 106, 108 and 110. In some embodiments, the one or more nucleic acid molecules encoding the hydroxymethylglutaryl-CoA synthase is hmgS, or homolog thereof. In a further embodiment, the one or more nucleic acid molecules encoding the hydroxymethylglutaryl-CoA synthase comprises an amino acid sequence set forth in SEQ ID NO: 123. In yet another embodiment, the one or more nucleic acid molecules encoding the hydroxymethylglutaryl-CoA synthase is encoded by a nucleic acid sequence set forth in SEQ ID NO: 122.

### Methylglutaconyl-CoA Hydratase (EC 4.2.1.18)

[0316] The present disclosure describes enzymes that can catalyze the following reaction:

(S)-3-hydroxy-3-methylglutaryl-CoA↔trans-3-methylglutaconyl-CoA+H₂O

[0317] This enzyme catalyzes the syn-hydration of 3-methylglutaconyl-CoA to (S)-3-hydroxy-3-methylglutaryl-CoA in the leucine degradation pathway. The bacterial enzyme has been characterized in Pseudomonas putida. It differs from the mammalian enzyme in having only one glutamyl residue in its active site rather than two, resulting in a different reaction mechanism. These enzymes are members of the crotonase superfamily (Wong B J and Gerlt J A (2004) Evolution of function in the crotonase superfamily: (3S)-methylglutaconyl-CoA hydratase from Pseudomonas putida. Biochemistry 43(16): 4646-4654) and reviewed in (Hamed R B et al. (2008) Mechanisms and structures of crotonase superfamily enzymes—how nature controls enolate and oxyanion reactivity. Cell Mol Life Sci 65(16): 2507-2527).

[0318] Recombinant enzyme was expressed in Escherichia coli, purified and characterized. The apparent molecular mass of the 10-His-tagged polypeptide was determined to be 32.251 kDa by ESI-MS. The 10-His-tag was subsequently removed before characterization of the enzyme (Wong and Gerlt 2004).

[0319] In one embodiment, the methylglutaconyl-CoA hydratase is encoded by one or more nucleic acid molecules obtained from Pseudomonas sp. In another embodiment, the methylglutaconyl-CoA hydratase is encoded by one or more nucleic acid molecules obtained from Pseudomonas putida. In some embodiments, the one or more nucleic acid molecules encoding the methylglutaconyl-CoA hydratase is liuC, or homolog thereof. In a further embodiment, the one or more nucleic acid molecules encoding the methylglutaconyl-CoA hydratase comprises an amino acid sequence set forth in SEQ ID NO: 125. In yet another embodiment, the one or more nucleic acid molecules encoding the methylglutaconyl-CoA hydratase is encoded by a nucleic acid sequence set forth in SEQ ID NO: 124.

### Methylcrotonyl-CoA Carboxylase (EC 6.4.1.4)

[0320] The present disclosure describes enzymes that can catalyze the following reaction:

ADP+phosphate+H⁺+3-methylglutaconyl-CoA↔ATP+3-methylcrotonoyl-CoA+HCO₃⁻

[0321] The enzyme activity is associated with the 3-methylcrotonyl-CoA carboxylase complex. This enzyme is a biotin-containing, biotin-dependent carboxylase involved in the L-leucine (and isovalerate) degradation pathway of Pseudomonas aeruginosa PAO1. This pathway is also the last phase of the acyclic terpene utilization pathway (citronellol degradation and cis-genanyl-CoA degradation pathways). The enzyme is not expressed in citronellol or citronellate grown cells, but is expressed in isovalerate grown cells. Genes liuB and liuD encode the two subunits of 3-methylcrotonyl-CoA carboxylase. The subunits are encoded in the liuRABCDE gene cluster of this organism (Hoschle B et al. (2005) Methylcrotonyl-CoA and geranyl-CoA carboxylases are involved in leucine/isovalerate utilization (Liu) and acyclic terpene utilization (Atu), and are encoded by liuB/liuD and atuC/atuF, in Pseudomonas aeruginosa. Microbiology 151 (Pt 11): 3649-3656; Forster-Fromme K and Jendrossek D (2010). Catabolism of citronellol and related acyclic terpenoids in pseudomonads. Appl Microbiol Biotechnol 87(3): 859-869).

[0322] The enzyme was purified from cell extracts by avidin-affinity chromatography and the SDS-gel-isolated subunits were subjected to trypsin fingerprint analysis and ESI-MS which allowed identification of their corresponding genes (Hoschle et al. 2005).

[0323] The 3-methylcrotonyl-CoA carboxylase of Pseudomonas citronellolis was characterized in earlier work (Hector M L and Fall R R (1976) Multiple acyl-coenzyme A carboxylases in Pseudomonas citronellolis. Biochemistry 15(16): 3465-3472; Fall R R and Hector M L (1977) Acyl-coenzyme A carboxylases. Homologous 3-methylcrotonyl-CoA and geranyl-CoA carboxylases from Pseudomonas citronellolis. Biochemistry 16(18): 4000-4005; Fall R R (1981) 3-Methylcrotonyl-CoA and geranyl-CoA carboxylases from Pseudomonas citronellolis. Methods Enzymol 71 Pt C: 791-799).

[0324] In one embodiment, the methylcrotonyl-CoA carboxylase is encoded by one or more nucleic acid molecules obtained from Pseudomonas sp. In another embodiment, the methylcrotonyl-CoA carboxylase is encoded by one or more nucleic acid molecules obtained from Pseudomonas aeruginosa. In some embodiments, the one or more nucleic acid molecules encoding the methylcrotonyl-CoA carboxylase is selected from liuB and/or liuD, or homologs thereof. In a further embodiment, the one or more nucleic acid molecules encoding the methylcrotonyl-CoA carboxylase comprises an amino acid sequence selected from SEQ ID NOs: 127 and 129. In yet another embodiment, the one or more nucleic acid molecules encoding the methylcrotonyl-CoA carboxylase is encoded by a nucleic acid sequence selected from SEQ ID NOs: 126 and 128.

### Methylcrotonyl-CoA Hydratase (EC 4.2.1.17)

[0325] The present disclosure describes enzymes that can catalyze the following reaction:

trans-2(or 3)-enoyl-CoA+H₂O↔(3S)-3-hydroxyacyl-CoA

[0326] An exemplary enzyme is a 3-ketoacyl-CoA thiolase. It is involved in the degradation of fatty acids via the β-oxidation cycle. It has broad chain-length specificity for substrates although it exhibits its highest activity with medium-chain substrates. It is part of a multienzyme complex and is coded for by the fadA gene (Yang S Y et al (1990) Nucleotide sequence of the fadA gene. Primary structure of 3-ketoacyl-coenzyme A thiolase from Escherichia coli and the structural organization of the fadAB operon. J Biol Chem 265(18): 10424-10429; http://www.ncbi.nlm.nih.gov/pubmed/7024730 Binstock J F and Schulz H (1981) Fatty acid oxidation complex from Escherichia coli. Methods Enzymol 71 Pt C:403-11).

[0327] 3-ketoacyl-CoA thiolase may also be known as acetyl-CoA C-acyltransferase, β-ketothiolase, acetyl-CoA acyltransferase and acyl-CoA:acetyl-CoA C-acyltransferase.

[0328] Another exemplary enzyme is an enoyl-CoA hydratase. The alpha subunit has four enzymatic activities associated with it. It is part of a multienzyme complex. Two of the activities, enoyl-CoA hydratase (EC 4.2.1.17) and 3-OH acyl-CoA epimerase (EC 5.1.2.3) are carried out by the same N terminal active site (Yang S Y and Elzinga M (1993) Association of both enoyl coenzyme A hydratase and 3-hydroxyacyl coenzyme A epimerase with an active site in the amino-terminal domain of the multifunctional fatty acid oxidation protein from Escherichia coli. J Biol Chem 268(9): 6588-6592).

[0329] In one embodiment, the methylcrotonyl-CoA hydratase is a 3-ketoacyl-CoA thiolase. In another embodiment, the methylcrotonyl-CoA hydratase is encoded by one or more nucleic acid molecules obtained from Escherichia coli. In some embodiments, the one or more nucleic acid molecules encoding the methylcrotonyl-CoA hydratase is fadA, or homolog thereof. In a further embodiment, the one or more nucleic acid molecules encoding the methylcrotonyl-CoA hydratase comprises an amino acid sequence set forth in SEQ ID NO: 131. In yet another embodiment, the one or more nucleic acid molecules encoding the methylcrotonyl-CoA hydratase is encoded by a nucleic acid sequence set forth in SEQ ID NO: 130.

[0330] In one embodiment, the methylcrotonyl-CoA hydratase is an enoyl-CoA hydratase. In another embodiment, the methylcrotonyl-CoA hydratase is encoded by one or more nucleic acid molecules obtained from Escherichia coli. In some embodiments, the one or more nucleic acid molecules encoding the methylcrotonyl-CoA hydratase is fadB, or homolog thereof. In a further embodiment, the one or more nucleic acid molecules encoding the methylcrotonyl-CoA hydratase comprises an amino acid sequence set forth in SEQ ID NO: 133. In yet another embodiment, the one or more nucleic acid molecules encoding the methylcrotonyl-CoA hydratase is encoded by a nucleic acid sequence set forth in SEQ ID NO: 132.

3-hydroxy-isovaleryl-CoA thioesterase (EC 3.1.2.-)

[0331] The present disclosure describes enzymes that can catalyze the following reactions:

3-hydroxyisovaleryl-CoA+H₂O↔3-hydroxyisovalerate+CoA

an acyl-CoA+H₂O→a carboxylate+coenzyme A+H⁺

[0332] An exemplary acyl-CoA thioesterase is TesB. Thioesterase II (TesB) is one of a number of thioesterases present in E. coli. The enzyme has relatively broad substrate specificity, cleaving medium- and long-chain acyl-CoA substrates; the best tested substrate was 3,5-tetradecadienoyl-CoA (Nie L et al. (2008) A novel paradigm of fatty acid beta-oxidation exemplified by the thioesterase-dependent partial degradation of conjugated linoleic acid that fully supports growth of Escherichia coli. Biochemistry 47(36): 9618-9626). Thioesterase II is one of the thioesterases supporting growth on oleate or conjugated linoleic acid as the sole source of carbon (Nie et al. 2008).

[0333] A crystal structure of the enzyme has been solved at 1.9 Å resolution. The D204 residue was predicted to be in the active site; its importance was confirmed by kinetic analysis of mutants (Li J et al. (2000) Crystal structure of the Escherichia coli thioesterase II, a homolog of the human Nef binding enzyme. Nat Struct Biol 7(7): 555-559).

[0334] Strains either lacking or overproducing tesB have no obvious defect (Narasimhan M L et al. (1986) Genetic and biochemical characterization of an Escherichia coli K-12 mutant deficient in acyl-coenzyme A thioesterase II. J Bacteriol 165(3): 911-917; Naggert J et al. (1991) Cloning, sequencing, and characterization of Escherichia coli thioesterase II. J Biol Chem 266(17): 11044-11050). Overproduction of TesB relieves inhibition of fatty acid synthesis by long-chain acyl-ACP molecules that accumulate upon glycerol starvation (Jiang P and Cronan J E (1994) Inhibition of fatty acid synthesis in Escherichia coli in the absence of phospholipid synthesis and release of inhibition by thioesterase action. J Bacteriol 176(10): 2814-2821).

[0335] In one embodiment, the 3-hydroxy-isovaleryl-CoA thioesterase is encoded by one or more nucleic acid molecules obtained from E. coli. In some embodiments, the one or more nucleic acid molecules encoding the 3-hydroxy-isovaleryl-CoA thioesterase is tesB, or homolog thereof. In a further embodiment, the one or more nucleic acid molecules encoding the 3-hydroxy-isovaleryl-CoA thioesterase comprises an amino acid sequence set forth in SEQ ID NO: 135. In yet another embodiment, the one or more nucleic acid molecules encoding the 3-hydroxy-isovaleryl-CoA thioesterase is encoded by a nucleic acid sequence set forth in SEQ ID NO: 134.

### Mevalonate-3-Kinase (EC 2.7.1.-)

[0336] The present disclosure describes enzymes that can catalyze the following reaction:

3-hydroxyisovalerate+ATP [symbol] ADP+H(+)+3-phosphonoxyisovalerate

(R)-mevalonate+ATP→(R)-mevalonate 3-phosphate+ADP+H+

[0337] Mevalonate-3-kinase may also be known as (R)-MVA 3-phosphotransferase or 3-hydroxyisovalerate (3HIV) kinase.

[0338] The subunit structure of this enzyme from Thermoplasma acidophilum has not been reported.

[0339] The mevalonate-3-kinase from the thermophilic archaeon Thermoplasma acidophilum is thought to participate in a variant of the mevalonate pathway found in archaea Azami Y et al. (2014) (R)-Mevalonate 3-Phosphate Is an Intermediate of the Mevalonate Pathway in Thermoplasma acidophilum. J Biol Chem 289(23): 15957-15967; http://www.ncbi.nlm.nih.gov/pubmed/24914732 Vinokur J M et al. (2014) Evidence of a Novel Mevalonate Pathway in Archaea. Biochemistry 53(25): 4161-4168).

[0340] Recombinant His-tagged enzyme was expressed in Escherichia coli, purified and characterized. Despite its homology with diphosphomevalonate decarboxylase, it showed no decarboxylase activity (Azami et al. 2014; Vinokur et al. 2014). The enzyme showed weak phosphomevalonate kinase activity, producing small amounts of (R)-mevalonate diphosphate (Azami et al. 2014). It had no mevalonate-5-kinase activity (Vinokur et al. 2014).

[0341] In one embodiment, the 3HIV kinase is encoded by one or more nucleic acid molecules obtained from a microorganism selected from the group consisting of Thermoplasma sp. and Picrophilus sp. In another embodiment, the 3HIV kinase is encoded by one or more nucleic acid molecules obtained from a microorganism selected from the group consisting of Thermoplasma acidophilum and Picrophilus torridus. In some embodiments, the one or more nucleic acid molecules encoding the 3HIV kinase is TA1305 and/or PTO1356, or homolog thereof. In some embodiments, the TA1305 comprises a L200E mutation. In a further embodiment, the one or more nucleic acid molecules encoding the 3HIV-kinase comprises an amino acid sequence selected from the group consisting of SEQ ID NOs: 113, 115 and 117. In yet another embodiment, the one or more nucleic acid molecules encoding the 3HIV kinase is encoded by a nucleic acid sequence selected from the group consisting of SEQ ID NOs: 112, 114 and 116.

### Mevalonate Diphosphate Decarboxylase (EC 4.1.1.-)

[0342] The present disclosure describes enzymes that can catalyze the following reactions:

(R)-mevalonate diphosphate+ATP→isopentenyl diphosphate+CO₂+ADP+phosphate

3-phosphonoxyisovalerate→CO₂+isobutene

3-hydroxyisovalerate→CO₂+isobutene

[0343] Mevalonate diphosphate decarboxylase may also be known as pyrophosphomevalonate decarboxylase, mevalonate-5-pyrophosphate decarboxylase, pyrophosphomevalonic acid decarboxylase, 5-pyrophosphomevalonate decarboxylase, mevalonate 5-diphosphate decarboxylase, and ATP:(R)-5-diphosphomevalonate carboxy-lyase (dehydrating), 3-phosphonoxyisovalerate decarboxylase, 3-hydroxyisovalerate-3-phosphate decarboxylase, 3HIV-3-phosphate decarboxylase, 3-hydroxyisovalerate decarboxylase and 3HIV decarboxylase.

[0344] This enzyme converts mevalonate 5-diphosphate (MVAPP) to isopentenyl diphosphate (IPP) through ATP dependent decarboxylation. The two substrates of this enzyme are ATP and mevalonate 5-diphosphate, whereas its four products are ADP, phosphate, isopentenyl diphosphate, and CO₂.

[0345] Mevalonate diphosphate decarboxylase catalyzes the final step in the mevalonate pathway. The mevalonate pathway is responsible for the biosynthesis of isoprenoids from acetate. This pathway plays a key role in multiple cellular processes by synthesizing sterol isoprenoids, such as cholesterol, and non-sterol isoprenoids, such as dolichol, heme A, tRNA isopentenyltransferase, and ubiquinone. This enzyme belongs to the family of lyases, specifically the carboxy-lyases, which cleave carbon-carbon bonds.

[0346] Mevalonate diphosphate decarboxylase recognizes and binds two substrates: ATP and mevalonate 5-diphosphate. After binding, the enzyme performs three types of reactions that can be separated into two main stages. First, phosphorylation occurs. This creates a reactive intermediate, which in the second stage undergoes concerted dephosphorylation and decarboxylation.

[0347] In one embodiment, the enzyme that catalyzes the reaction 3-phosphonoxyisovalerate→CO₂+isobutene is a 3HIV-3-phosphate decarboxylase. In another embodiment, the 3HIV-3-phosphate decarboxylase is encoded by one or more nucleic acid molecules obtained from Streptococcus sp. In some embodiments, the microorganism is selected from Streptococcus mitis and/or Streptococcus gordonii. In some embodiments, the one or more nucleic acid molecules encoding the 3HIV-3-phosphate decarboxylase comprises an amino acid sequence selected from SEQ ID NOs: 119 and 121. In further embodiments, the one or more nucleic acid molecule encoding the 3HIV-3-phosphate decarboxylase is encoded by a nucleic acid sequence selected from SEQ ID NOs: 118 and 120.

[0348] In one embodiment, the enzyme that catalyzes the reaction 3-hydroxyisovalerate→CO₂+isobutene is a 3HIV decarboxylase. In another embodiment, the 3HIV decarboxylase is encoded by one or more nucleic acid molecules obtained from a microorganism selected from the group consisting of Streptococcus sp., Thermoplasma sp. and Picrophilus sp. In another embodiment, the 3HIV decarboxylase is encoded by one or more nucleic acid molecules obtained from a microorganism selected from the group consisting of Streptococcus gordonii, Thermoplasma acidophilum and Picrophilus torridus. In some embodiments, the one or more nucleic acid molecules encoding the 3HIV decarboxylase comprises mvaD, TA1305 and/or PTO1356, or homolog thereof. In a further embodiment, the one or more nucleic acid molecules encoding the 3HIV decarboxylase comprises an amino acid sequence selected from the group consisting of SEQ ID NOs: 113, 117 and 121. In yet another embodiment, the one or more nucleic acid molecules encoding the 3HIV decarboxylase is encoded by a nucleic acid sequence selected from the group consisting of SEQ ID NOs: 112, 116 and 120.

### Transketolase (EC 2.2.1.1)

[0349] The present disclosure describes enzymes that can catalyze the following reactions:

D-erythrose 4-phosphate+D-xylulose 5-phosphate↔β-D-fructofuranose 6-phosphate+D-glyceraldehyde 3-phosphate

D-sedoheptulose 7-phosphate+D-glyceraldehyde 3-phosphate↔D-ribose 5-phosphate+D-xylulose5-phosphate

[0350] Transketolase may also be known as glycolaldehydetransferase.

[0351] Transketolase catalyzes the reversible transfer of a ketol group between several donor and acceptor substrates. This key enzyme is a reversible link between glycolysis and the pentose phosphate pathway. The enzyme is involved in the catabolism of pentose sugars, the formation of D-ribose 5-phosphate, and the provision of D-erythrose 4-phosphate, a precursor of aromatic amino acids and PLP. E. coli contains two transketolase isozymes, TktA and TktB. TktA is responsible for the major transketolase activity.

[0352] In addition to its function in central carbon metabolism, transketolase appears to also have an unexpected role in chromosome structure; a tktA mutant affects chromosome topology.

[0353] Crystal structures of TktA in complex with donor and acceptor substrates have been solved, elucidating the reaction mechanism and mode of action of transketolase. A computational model of transketolase activity using a quantum mechanical/molecular mechanical method has been proposed, defining a new route for thiamine diphosphate activation. Transketolase I (TktA) is homodimeric. The urea denaturation pathways of wild type and active site mutants of TktA have been investigated, and the effects of temperature and pH on the structure, stability, aggregation and activity of transketolase have been determined. The acceptor specificity of TktA has been investigated.

[0354] TktA abundance is affected by the SOS inducer and mutagen 7-methoxy-2-nitronaphtho[2,1-b]furan (R7000). tktA is negatively regulated during entry into stationary phase. The effect by RpoS is likely indirect and might be mediated by an intermediate regulator that itself is directly regulated by RpoS.

[0355] The subunit structure of transketolase II (TktB) has not been explicitly determined. Overproduction of TktB suppresses the tktA mutant phenotype. Expression of tktB is increased in a tyrR mutant in the presence of phenylalanine. tktB expression is increased in stationary phase and positively regulated by RpoS and ppGpp. Levels of TktB protein increase during osmotic stress under aerobic, but not anaerobic growth conditions. TktB appears to be associated with the degradosome and may connect carbon metabolism to replication.

[0356] Expression of tktA and tktB is complementary, resulting in approximately constant levels of transketolase expression throughout growth.

[0357] In some embodiments, the transketolase is encoded by an amino acid sequence having at least 70% sequence identity to tktA from E. coli. In a further embodiment, the transketolase is encoded by an amino acid sequence having at least 80% sequence identity to tktA from E. coli. In yet a further embodiment, the transketolase is encoded by an amino acid sequence having at least 90% sequence identity to tktA from E. coli. In other embodiments, the transketolase is tktA from E. coli. In some embodiments, the transketolase is encoded by an amino acid sequence having at least 70% sequence identity to tktB from E. coli. In a further embodiment, the transketolase is encoded by an amino acid sequence having at least 80% sequence identity to tktB from E. coli. In yet a further embodiment, the transketolase is encoded by an amino acid sequence having at least 90% sequence identity to tktB from E. coli. In other embodiments, the transketolase is tktB from E. coli.

[0358] In some embodiments, the one or more nucleic acid molecules encoding the transketolase is tktA, or homolog thereof. In some embodiments, the one or more nucleic acid molecules encoding the transketolase is tktB, or homolog thereof. In another embodiment, the one or more nucleic acid molecules encoding the transketolase comprises an amino acid sequence selected from the group consisting of SEQ ID NOs: 148 and 150. In a further embodiment, the one or more nucleic acid molecule encoding the transketolase is encoded by a nucleic acid sequence selected from the group consisting of SEQ ID NOs: 147 and 149.

### Transaldolase (EC 2.2.1.2)

[0359] The present disclosure describes enzymes that can catalyze the following reaction:

D-sedoheptulose 7-phosphate+D-glyceraldehyde 3-phosphate→β-D-fructofuranose 6-phosphate+D-erythrose 4-phosphate

[0360] Transaldolase may also be known as dihydroxyacetonetransferase; dihydroxyacetone synthase; formaldehyde transketolase.

[0361] Transaldolase B is an enzyme of the non-oxidative branch of the pentose phosphate pathway. Along with transketolase, transaldolase creates a reversible link between the pentose phosphate pathway and glycolysis. It catalyzes the interconversion of glyceraldehyde-3-phosphate and sedoheptulose-7-phosphate to fructose-6-phosphate and erythrose-4-phosphate. The reversibility of this reaction and carbon flux through the pentose phosphate pathway has been addressed both experimentally and theoretically.

[0362] There are two closely related transaldolases in E. coli, encoded by talA and talB. Only transaldolase B has been biochemically characterized. TalB is a dimer in solution and in the crystal structure. Mutation of the R300 residue leads to the formation of catalytically active monomers. Catalytically important active site residues have been identified by site-directed mutagenesis.

[0363] Crystal structures of transaldolase B have been determined, confirming the presence of a Schiff-base intermediate at the active site and leading to a proposed reaction mechanism.

[0364] A talB null mutant has no growth defect on minimal media with glucose as the carbon source.

[0365] In some embodiments, the transaldolase is encoded by an amino acid sequence having at least 70% sequence identity to talA or talB from E. coli. In a further embodiment, the transaldolase is encoded by an amino acid sequence having at least 80% sequence identity to talA or talB from E. coli. In yet a further embodiment, the transaldolase is encoded by an amino acid sequence having at least 90% sequence identity to talA or talB from E. coli. In other embodiments, the transaldolase is talA from E. coli. In yet further embodiments, the transaldolase is talB from E. coli.

[0366] In some embodiments, the one or more nucleic acid molecules encoding the transaldolase is talA, or homolog thereof. In some embodiments, the one or more nucleic acid molecules encoding the transaldolase is talB, or homolog thereof. In another embodiment, the one or more nucleic acid molecules encoding the transaldolase comprises an amino acid sequence selected from the group consisting of SEQ ID NOs: 152 and 154. In a further embodiment, the one or more nucleic acid molecule encoding the transaldolase is encoded by a nucleic acid sequence selected from the group consisting of SEQ ID NOs: 151 and 153.

### Ribose-5-Phosphate Isomerase (EC 5.3.1.6)

[0367] The present disclosure describes enzymes that can catalyze the following reaction:

D-ribose 5-phosphate↔D-ribulose 5-phosphate

[0368] Ribose-5-phosphate isomerase may also be known as phosphopentosisomerase; phosphoriboisomerase; ribose phosphate isomerase; 5-phosphoribose isomerase; D-ribose 5-phosphate isomerase; D-ribose-5-phosphate ketol-isomerase.

[0369] There are two physically and genetically distinct ribose-5-phosphate isomerases present in E. coli. The constitutive ribose-5-phosphate isomerase A (rpiA) normally accounts for more than 99% of the ribose-5-phosphate isomerase activity in the cell and functions in the pentose phosphate pathway (non-oxidative branch). The inducible ribose-5-phosphate isomerase B (rpiB) can substitute for rpiA's function if its expression is induced. There is no sequence similarity between the two enzymes.

[0370] Crystal structures of RpiA have been solved and active site residues and an acid-base catalytic mechanism were predicted. An rpiA mutant requires ribose for growth.

[0371] In some embodiments, the ribose-5-phosphate isomerase is encoded by an amino acid sequence having at least 70% sequence identity to rpiA from E. coli. In a further embodiment, the ribose-5-phosphate isomerase is encoded by an amino acid sequence having at least 80% sequence identity to rpiA from E. coli. In yet a further embodiment, the ribose-5-phosphate isomerase is encoded by an amino acid sequence having at least 90% sequence identity to rpiA from E. coli. In other embodiments, the ribose-5-phosphate isomerase is rpiA from E. coli.

[0372] In some embodiments, the one or more nucleic acid molecules encoding the ribose-5-phosphate isomerase is rpiA, or homolog thereof. In another embodiment, the one or more nucleic acid molecules encoding the ribose-5-phosphate isomerase comprise an amino acid sequence set forth in SEQ ID NO: 156. In a further embodiment, the one or more nucleic acid molecule encoding the ribose-5-phosphate isomerase is encoded by a nucleic acid sequence set forth in SEQ ID NO: 155.

### Ribulose-5-Phosphate 3-Epimerase (EC 5.1.3.1)

[0373] The present disclosure describes enzymes that can catalyze the following reaction:

D-ribulose 5-phosphate↔D-xylulose 5-phosphate

[0374] Ribulose-5-phosphate 3-epimerase may also be known as ribulose-phosphate 3-epimerase; phosphoribulose epimerase; erythrose-4-phosphate isomerase; phosphoketopentose 3-epimerase; xylulose phosphate 3-epimerase; phosphoketopentose epimerase; D-ribulose phosphate-3-epimerase; D-ribulose 5-phosphate epimerase; D-ribulose-5-P 3-epimerase; D-xylulose-5-phosphate 3-epimerase; pentose-5-phosphate 3-epimerase.

[0375] Ribulose-5-phosphate 3-epimerase (Rpe) is an enzyme of the non-oxidative branch of the pentose phosphate pathway.

[0376] Rpe requires ferrous iron for activity and is vulnerable to damage by H₂O₂ due to Fenton chemistry. Mn²⁺, Co²⁺ and Zn²⁺ can substitute for Fe²⁺ to varying degrees, and Rpe containing these alternative cations is not vulnerable to H₂O₂. Induction of the manganese transporter can protect Rpe from H₂O₂ damage.

[0377] In some embodiments, the ribulose-5-phosphate 3-epimerase is encoded by an amino acid sequence having at least 70% sequence identity to rpe from E. coli. In a further embodiment, the ribulose-5-phosphate 3-epimerase is encoded by an amino acid sequence having at least 80% sequence identity to rpe from E. coli. In yet a further embodiment, the ribulose-5-phosphate 3-epimerase is encoded by an amino acid sequence having at least 90% sequence identity to rpe from E. coli. In other embodiments, the ribulose-5-phosphate 3-epimerase is rpe from E. coli.

[0378] In some embodiments, the one or more nucleic acid molecules encoding the ribulose-5-phosphate 3-epimerase is rpe, or homolog thereof. In another embodiment, the one or more nucleic acid molecules encoding the ribulose-5-phosphate 3-epimerase comprise an amino acid sequence set forth in SEQ ID NO: 158. In a further embodiment, the one or more nucleic acid molecule encoding the ribulose-5-phosphate 3-epimerase is encoded by a nucleic acid sequence set forth in SEQ ID NO: 157.

### Fructose 6-Phosphate Phosphoketolase (Fpk, EC 4.1.2.22)

[0379] The present disclosure describes enzymes that can catalyze the following reaction:

D-fructose 6-phosphate+phosphate↔acetyl phosphate+D-erythrose 4-phosphate+H₂O

[0380] The phosphoketolase reaction by which β-D-fructofuranose 6-phosphate is converted to D-erythrose 4-phosphate and acetyl phosphate is one of the key reactions in the Bifidobacterium shunt. There is evidence for the existence of two distinct F6P-phosphoketolase enzymes in bifidobacteria. One is specific solely for F6P while the other is able to utilize both F6P and D-xylulose 5-phosphate (EC: 4.1.2.9), a reaction that appears later in the Bifidobacterium shunt. The enzyme encoded by the xfp gene, originally discovered in Bifidobacterium animalis lactis, is the dual-specificity enzyme. A phosphoketolase has also been purified from Leuconostoc nesenteroides (LEUM_1961).

[0381] In some embodiments, an enzyme having fructose-6-phosphate phosphoketolase activity is encoded by an amino acid sequence having at least 70% sequence identity, at least 80% sequence identity, or at least 90% sequence identity to an enzyme having fructose-6-phosphate phosphoketolase activity selected from the group consisting of Bifidobacterium dentium BDP_1006, Bifidobacterium lactis xfp, Lactobacillus paraplantarum xpkA and Bifidobacterium breve xfp. In a preferred embodiment, an enzyme having fructose-6-phosphate phosphoketolase activity is selected from the group consisting of Bifidobacterium dentium BDP_1006, Bifidobacterium lactis xfp, Lactobacillus paraplantarum xpkA and Bifidobacterium breve xfp. In another embodiment, the one or more nucleic acid molecules encoding the fructose-6-phosphate phosphoketolase comprise an amino acid sequence selected from the group consisting of SEQ ID NOs: 212, 214, 216 and 218. In a further embodiment, the one or more nucleic acid molecule encoding the fructose-6-phosphate phosphoketolase is encoded by a nucleic acid sequence selected from the group consisting of SEQ ID NOs: 211, 213, 215 and 217.

### Phosphate Acetyltransferase (EC 2.3.1.8)

[0382] The present disclosure describes enzymes that can catalyze the following reaction:

Acetyl-CoA+phosphate↔CoA+acetyl phosphate

[0383] Phosphate acetyltransferase (Pta) catalyzes the reversible conversion between acetyl-CoA and acetylphosphate, a step in the metabolism of acetate. Both pyruvate and phosphoenolpyruvate activate the enzyme in the direction of acetylphosphate synthesis and inhibit the enzyme in the direction of acetyl-CoA synthesis. The acetate formation from acetyl-CoA I pathway has been the target of metabolic engineering to reduce the flux to acetate and increase the production of commercially desired end products. It has also been studied using systems biology approaches such as metabolic modeling and flux balance analysis.

[0384] Pta is composed of three domains; only the C-terminal domain is required for phosphate acetyltransferase activity. The N-terminal domain is involved in stabilization of the native quarternary structure and metabolic regulation.

[0385] Pta may be able to utilize both acetyl-CoA and propionyl-CoA. An ack pta double mutant has reduced levels of propionate from L-threonine, suggesting that the enzyme is part of the anaerobic pathway metabolizing L-threonine to propionate. A pta mutant does not grow on acetate as the sole source of carbon. Both pta and pta ackA mutants are impaired in their ability to survive glucose starvation. The growth defect of a pta mutant appears to be due to perturbation of acetyl-CoA flux. pta mutants produce large amounts of lactate when grown on glucose as the carbon source under microaerophilic conditions. The effect of a pta mutation on metabolism, enzyme activity and gene expression has been thoroughly studied recently. pta and recBC mutants are synthetically growth inhibited.

[0386] Levels of Pta are decreased by growth on acetate and under low pH conditions. pta belongs to the CreBC regulon. FNR has a slightly positive effect on pta expression. The growth-rate dependent expression pattern of pta-ackA was measured.

[0387] The pta gene that encodes the enzyme has been cloned from Clostridium acetobutylicum, sequenced and expressed in Escherichia coli. The gene is adjacent to the ackA gene, which encodes the enzyme that catalyzes the second step—acetate kinase. Enzyme activity assays performed on cell extracts from Escherichia coli and Clostridium acetobutylicum harboring the subclone showed elevated activity. The enzymes shows a decrease in specific activity when the organism reaches the solvent formation stage.

[0388] Enzymes having phosphate acetyltransferase activity or phosphate acetyltransferase genes have also been identified or measured from E. coli (eutD, pta), Roseovarius nubinhibens ISM, Clostridium kluyveri, Chlamydomonas reinhardtii (PAT2), Dasytricha ruminantium, Pelobacter acetylenicus, Gottschalkia acidurici, Lactobacillus sanfranciscensis, Paracoccus denitrificans NKNIS, Eubacterium oxidoreducens G41, Mycoplasma pneumoniae M129, Thermotoga maritima, Moorella thermoacetica, Methanosarcina thermophile, Clostridium propionicum and Fusobacterium nucleatum.

[0389] In some embodiments, an enzyme having phosphate acetyltransferase activity is encoded by an amino acid sequence having at least 70% sequence identity, at least 80% sequence identity, or at least 90% sequence identity to an enzyme having phosphate acetyltransferase activity selected from E. coli pta and Clostridium acetobutylicum pta. In a preferred embodiment, an enzyme having phosphate acetyltransferase activity is selected from E. coli pta and Clostridium acetobutylicum pta. In another embodiment, the one or more nucleic acid molecules encoding the phosphate acetyltransferase comprise an amino acid sequence selected from SEQ ID NOs: 220 and 222. In a further embodiment, the one or more nucleic acid molecule encoding the phosphate acetyltransferase is encoded by a nucleic acid sequence selected from SEQ ID NOs: 219 and 221.

### Glucose-6-Phosphate 1-Dehydrogenase (EC 1.1.1.49)

[0390] The present disclosure describes enzymes that can catalyze the following reaction:

D-glucose 6-phosphate+NADP⁺↔6-phospho-D-glucono-1,5-lactone+NADPH

[0391] Glucose-6-phosphate 1-dehydrogenase may also be known as glucose-6-phosphate dehydrogenase (NADP+); NADP-glucose-6-phosphate dehydrogenase; Zwischenferment; D-glucose 6-phosphate dehydrogenase; glucose 6-phosphate dehydrogenase (NADP); NADP-dependent glucose 6-phosphate dehydrogenase; 6-phosphoglucose dehydrogenase; Entner-Doudoroff enzyme; G6PDH; GPD; glucose-6-phosphate dehydrogenase.

[0392] Glucose-6-phosphate dehydrogenase (G6PDH) is the first enzyme of the pentose phosphate pathway and provides a large fraction of the NADPH needed for anabolism.

[0393] The E. coli G6PDH shows a strong preference for NADP+ over NAD+. The structural basis for this preference was studied using molecular simulations, kinetic characterization of site-directed mutants and phylogenetic analyses.

[0394] Metabolic flux through the pathways of central carbon metabolism was measured using GC-MS and ¹³C labeling and 2D NMR spectroscopy. Regulation of these pathways under different growth conditions was measured at the level of enzyme expression and activity.

[0395] Substitution of an NADH-producing glucose-6-phosphate dehydrogenase for the native NADPH-producing enzyme reduced the growth rate of otherwise wild-type cells, while increasing the growth rate of a Δpgi mutant. This suggests that whether production of NADH by G6PDH is beneficial or detrimental in vivo depends on the operation of the upper Embden-Meyerhof pathway.

[0396] In addition to its role in central carbon metabolism, G6PDH was found to be the source of a linear peptide with the amino acid sequence Asn-Asn-Trp-Asn-Asn (NNWNN) that acts as an “extracellular death factor” (EDF) for MazEF-mediated cell death. The peptide acts by increasing the endoribonuclease activity of the toxins MazF and ChpBK. EDF production under stress conditions is due to cleavage of the zwf mRNA at specific ACA sites by MazF, generating a leaderless truncated mRNA. The location of the EDF-coding region with respect to the MazF cleavage sites is important, and the trans-translation system is required.

[0397] zwf is one of the most consistently flux-coupled genes, which are genes whose expression transition patterns upon perturbations are correlated with their corresponding flux values. Expression of zwf is growth rate-regulated at the transcriptional level. G6PDH activity is greater in rapidly growing cells, and is greater under nitrogen-limited compared to carbon-limited growth conditions. zwf is a part of the SoxRS regulon which responds to superoxide stress. Additional regulators have been shown to activate transcription of zwf. Exposure to tellurite activates transcription of zwf and thereby increases the synthesis of NADPH.

[0398] A zwf null mutation does not affect the growth rate significantly. However, central carbon metabolism and metabolic flux is changed. A pgi zwf double mutant does not grow on glucose as the sole source of carbon. In the presence of glucose, it accumulates high levels of glucose-6-phosphate, which inhibits fructose-1,6-bisphosphatase I activity. Deletion of zwf reduces the organic solvent tolerance of E. coli JM109.

[0399] In some embodiments, a recombinant microorganism producing MEG or glycolic acid, or MEG and one or more co-product, comprises a deletion, insertion, or loss of function mutation in a gene encoding a glucose-6-phosphate dehydrogenase to prevent the flux of glucose-6-phosphate through the oxidative branch of the pentose phosphate pathway and instead shunt glucose-6-phosphate through the non-oxidative branch of the pentose phosphate pathway to produce D-ribose-5-phosphate intermediate.

### 6-Phosphogluconolactonase (EC 3.1.1.31)

[0400] The present disclosure describes enzymes that can catalyze the following reaction:

6-phospho D-glucono-1,5-lactone+H₂O→D-gluconate 6-phosphate+H+

[0401] 6-phosphogluconolactonase may also be known as phosphogluconolactonase; 6-PGL.

[0402] 6-phosphogluconolactonase is an enzyme of the oxidative pentose phosphate pathway.

[0403] A pgl mutant strain grows only slightly slower than wild type on glucose as the sole source of carbon. Growth on glucose may be due to non-enzymatic hydrolysis of 6-phospho D-glucono-1,5-lactone or a bypass pathway that involves dephosphorylation and export of gluconolactone, hydrolysis to gluconate, followed by gluconate re-import and phosphorylation. When grown on maltose medium, strains lacking Pgl activity turn blue after iodine treatment. The phenotype of a pgl deletion strain can be complemented by expression of the pgl gene from Pseudomonas putida, although there is no detectable similarity between the two genes.

[0404] A strategy for metabolic engineering of E. coli for the production of riboflavin included overexpression of pgl, leading to an increase in riboflavin titer.

[0405] pgl is part of a genomic region that is deleted in the E. coli B strain BL21, but is present in the K-12 strain MG1655.

[0406] In some embodiments, a recombinant microorganism producing MEG or glycolic acid, or MEG and one or more co-product, comprises a deletion, insertion, or loss of function mutation in a gene encoding a 6-phosphogluconolactonase to prevent the flux of glucose-6-phosphate through the oxidative branch of the pentose phosphate pathway and instead shunt glucose-6-phosphate through the non-oxidative branch of the pentose phosphate pathway to produce D-ribose-5-phosphate intermediate.

### 6-Phosphogluconate Dehydrogenase, Decarboxylating (EC 1.1.1.44)

[0407] The present disclosure describes enzymes that can catalyze the following reaction:

D-gluconate 6-phosphate+NADP+→D-ribulose 5-phosphate+CO2+NADPH

[0408] 6-phosphogluconate dehydrogenase may also be known as phosphogluconate dehydrogenase (NADP+-dependent, decarboxylating); phosphogluconic acid dehydrogenase; 6-phosphogluconic dehydrogenase; 6-phosphogluconic carboxylase; 6-phospho-D-gluconate dehydrogenase; glyceraldehyde 3-phosphate dehydrogenase.

[0409] 6-phosphogluconate dehydrogenase is an enzyme of the oxidative branch of the pentose phosphate pathway.

[0410] Three crystal structures of the enzyme in complex with substrate and cosubstrate compounds have been solved. Binding of NADP+ may induce a conformational change in the enzyme. A catalytic mechanism has been proposed.

[0411] gnd is a highly polymorphic gene within E. coli populations, likely due to interstrain transfer and recombination. This may be a result of its proximity to the rfb region, which determines O antigen structure.

[0412] Expression of 6-phosphogluconate dehydrogenase is growth rate-regulated. Most of the growth rate-dependent increase in Gnd levels is due to increased transcription, leading to higher mRNA levels. Posttranscriptional regulation involves a secondary structure element between codons 67 and 78 of the gnd mRNA. This region may function by sequestration of the translation initiation region into an mRNA secondary structure, thus reducing the efficiency of translation initiation. However, the effector of this regulatory mechanism has apparently not yet been identified. truA (hisT) mutants reduce the growth rate-dependent increase of Gnd expression by post-transcriptional regulation. Growth under acidic conditions upregulates expression of gnd. gnd is one of the most consistently flux-coupled genes (FCGs), which are genes whose expression transition patterns upon perturbations are correlated with their corresponding flux values.

[0413] Certain growth conditions selected for a deletion mutation in the promoter region that results in increased transcription of gnd and increased enzyme activity. An edd gnd double mutant is unable to grow on gluconate. A null mutation in gnd does not significantly alter the growth rate. However, cellular metabolism and metabolic flux is changed; succinate production is increased during growth on glucose or glycerol. A gnd deletion mutant shows enhanced ethanol and H₂ production compared to wild type during anaerobic growth on glycerol, whereas in a different, heavily engineered strain, overexpression of gnd increases ethanol and H₂ production.

[0414] In some embodiments, a recombinant microorganism producing MEG or glycolic acid, or MEG and one or more co-product, comprises a deletion, insertion, or loss of function mutation in a gene encoding a 6-phosphogluconate dehydrogenase to prevent the flux of glucose-6-phosphate through the oxidative branch of the pentose phosphate pathway and instead shunt glucose-6-phosphate through the non-oxidative branch of the pentose phosphate pathway to produce D-ribose-5-phosphate intermediate.

### Glyceraldehyde 3-Phosphate Dehydrogenase, Phosphorylating (EC 1.2.1.12)

[0415] The present disclosure describes enzymes that can catalyze the following reaction:

D-glyceraldehyde 3-phosphate+NAD++phosphate↔1,3-bisphospho-D-glycerate+NADH+H+

[0416] Glyceraldehyde 3-phosphate dehydrogenase may also be known as glyceraldehyde-3-phosphate dehydrogenase (phosphorylating); triosephosphate dehydrogenase; dehydrogenase, glyceraldehyde phosphate; phosphoglyceraldehyde dehydrogenase; 3-phosphoglyceraldehyde dehydrogenase; NAD+-dependent glyceraldehyde phosphate dehydrogenase; glyceraldehyde phosphate dehydrogenase (NAD+); glyceraldehyde-3-phosphate dehydrogenase (NAD+); NADH-glyceraldehyde phosphate dehydrogenase; glyceraldehyde-3-P-dehydrogenase.

[0417] Glyceraldehyde 3-phosphate dehydrogenase A catalyzes the reversible oxidative phosphorylation of D-glyceraldehyde-3-phosphate to 1,3-bisphospho-D-glycerate in the presence of NAD+ and phosphate during glycolysis and gluconeogenesis in E. coli. The enzyme is also found in many other organisms and its properties have been extensively studied.

[0418] E. coli is unusual in having two glyceraldehyde-3-phosphate dehydrogenase (GAPDH) activities encoded by gapA and epd (gapB). However, the gapA encoded enzyme has a highly efficient phosphorylating glyceraldehyde-3-phosphate dehydrogenase activity and a low phosphorylating erythrose-4-phosphate dehydrogenase activity, whereas the epd encoded enzyme has an efficient non-phosphorylating erythrose-4-phosphate dehydrogenase activity and a very low phosphorylating glyceraldehyde-3-phosphate dehydrogenase activity.

[0419] The GapA protein has a sequence that is more similar to eukaryotic sequences than to the thermophilic bacterial enzymes, and to prokaryotic enzymes in general. The gapA product is required for glycolysis, while the epd product is not. Both enzymes may be involved in production of pyridoxal 5′-phosphate (PLP).

[0420] Early studies of gapA mutants from E. coli K-10 implicated its role in glycolysis and demonstrated some of its catalytic properties. A gapA mutant exhibits a growth defect and also exhibits increased aggregation and lysis phenotypes that are rescued by high-salt media.

[0421] Regulation of gapA gene expression has been studied. The regulation of the fkpA, gapA, and hslT genes is affected by evolution under conditions of chronic heat stress.

[0422] The E. coli sequence contains several amino acids that are conserved in all GAPDHs and are postulated to be involved in NAD+ binding, or the catalytic mechanism.

[0423] The crystal structure of the wild-type enzyme in the presence of NAD+ has been determined at 1.80 Å resolution and was similar to those of other GAPDHs. The crystal structure of a N313T mutant was also determined at 2.17 Å resolution. Several other E. coli GAPDH crystal structures have been reported with and without bound NAD+, and in the hemiacetal intermediate state.

[0424] Molecular factors responsible for the NAD+ cofactor stereospecificity have been studied using site-directed mutagenesis. The enzyme is a B-specific dehydrogenase that catalyzes transfer of the pro-S hydrogen and binds NAD(H) in the syn nicotinamide orientation. Refolding of denatured E. coli GAPDH in the presence of chaperone protein Tig; trigger factor has been studied.

[0425] ADP-ribosylated GAPDH is a secreted virulence factor in some fungi and Gram-positive pathogens, as well as in pathogenic strains of E. coli. Non-pathogenic E. coli do not secrete GAPDH. Evidence suggests that E. coli GAPDH is also involved in DNA repair.

[0426] A series of vectors inducibly expressing paired-terminus antisense RNAs was constructed to silence central carbon metabolism in host E. coli K-12 MG1655. A vector that silenced gapA at 93% efficacy caused severe growth inhibition. Regulating the expression of an engineered E. coli gapA through changes in temperature has been demonstrated to control glycolysis.

[0427] In some embodiments, a recombinant microorganism producing MEG or glycolic acid, or MEG and one or more co-product, comprises a deletion, insertion, or loss of function mutation in a gene encoding a glyceraldehyde 3-phosphate dehydrogenase to prevent the conversion of glyceraldehyde 3-phosphate to 1,3-bisphospho-D-glycerate and instead allow glyceraldehyde 3-phosphate to be converted to xylulose-5-phosphate (with a concurrent conversion of fructose-6-phosphate to erythrose-4-phosphate) by a transketolase, which can be further converted to D-ribose 5-phosphate, an intermediate in the non-oxidative pentose phosphate pathway, which can be converted by a D-ribose 5-phosphate aldolase into the intermediates glycoladehyde and D-glyceraldehyde 3-phosphate (G3P) for the production of MEG or glycolic acid, or MEG and one or more co-product.

### Pentose-Phospohate Aldolase

[0428] Pentose-phosphate aldolases catalyze the reversible aldol reaction converting a pentose-phosphate into glyceraldehyde-3-phosphate and glycoaldehyde. In some embodiments, the pentose-phosphate aldolase is a D-ribose-5-phosphate aldolase (DERA), a D-ribulose-5-phosphate aldolase, or a D-xylulose-5-phosphate aldolase.

[0429] In some embodiments a D-ribose-5-phosphate aldolase cataylses the conversion of D-ribose-5-phosphate to acetaldehyde and glyceraldehyde-3-phosphate.

[0430] In some embodiments a D-ribulose-5-phosphate aldolase cataylses the conversion of D-ribulose-5-phosphate to a glycoaldehyde and glyceraldehyde-3-phosphate.

[0431] In some embodiments a D-xylulose-5-phosphate aldolase cataylses the conversion of D-xylulose-5-phosphate to a glycoaldehyde and glyceraldehyde-3-phosphate.

[0432] In some embodiments the pentose-phosphate aldolase is derived from Escherichia Coli. In some embodiments the pentose-phosphate aldolase is derived from Bacillus caldolyticus.

[0433] In some embodiments the E. Coli pentose-phosphate aldolase is encoded by a nucleic acid sequence comprising:

(SEQ ID NO: 255)
ATGACTGATC TGAAAGCAAG CAGCCTGCGT GCACTGAAAT
TGATGGACCT GACCACCCTG AATGACGACG ACACCGACGA
GAAAGTGATC GCCCTGTGTC ATCAGGCCAA AACTCCGGTC
GGCAATACCG CCGCTATCTG TATCTATCCT CGCTTTATCC
CGATTGCTCG CAAAACTCTG AAAGAGCAGG GCACCCCGGA
AATCCGTATC GCTACGGTAA CCAACTTCCC ACACGGTAAC
GACGACATCG ACATCGCGCT GGCAGAAACC CGTGCGGCAA
TCGCCTACGG TGCTGATGAA GTTGACGTTG TGTTCCCGTA
CCGCGCGCTG ATGGCGGGTA ACGAGCAGGT CTGGTGAAAG
CCTGTAAAGA GGCTTGCGCG GCAGCGAATG TACTGCTGAA
AGTGATCATC GAAACCGGCG AACTGAAAGA CGAAGCGCTG
ATCCGTAAAG CGTCTGAAAT CTCCATCAAAGCGGGTGCGG
ACTTCATCAA AACCTCTACC GGTAAAGTGG CTGTGAACGC
GACGCCGGAA AGCGCGCGCA TCATGATGGA AGTGATCCGT
GATATGGGCG TAGAAAAAAC CGTTGGTTTC AAACCGGCGG
GCGGCGTGCGTACTGCGGAA GATGCGCAGA AATATCTCGC
CATTGCAGAT GAACTGTTCG GTGCTGACTG GGCAGATGCG
CGTCACTACC GCTTTGGCGC TTCCAGCCTG CTGGCAAGCC
TGCTGAAAGC GCTGGGTCAC GGCGACGGTA AGAGCGCCAG
CAGCTACTAA.

[0434] In some embodiments, the E. Coli pentose-phosphate aldolase is an amino acid sequence comprising:

(SEQ ID NO: 256)
MTDLKASSLRALKLMDLTTLNDDDTDEKVIALCHQAKTPVGNTAAICIYP
RFIPIARKTLKEQGTPEIRIATVTNFPHGNDDIDIALAETRAAIAYGADE
VDVVFPYRALMAGNEQVGFDLVKACKEACAAANVLLKVIIETGELKDEAL
IRKASEISIKAGADFIKTSTGKVAVNATPESARIMMEVIRDMGVEKTVGF
KPAGGVRTAEDAQKYLAIADELFGADWADARHYRFGASSLLASLLKALGH
GDGKSASSY.

[0435] In some embodiments the E. Coli pentose-phosphate aldolase comprises a C47N mutation and is encoded by a nucleic acid sequence comprising:

(SEQ ID NO: 255)
ATGACTGATCTGAAAGCAAGCAGCCTGCGTGCACTGAAATTGATGGACCT
GACCACCCTGAATGACGACGACACCGACGAGAAAGTGATCGCCCTGTGTC
ATCAGGCCAAAACTCCGGTCGGCAATACCGCCGCTATCAATATCTATCCT
CGCTTTATCCCGATTGCTCGCAAAACTCTGAAAGAGCAGGGCACCCCGGA
AATCCGTATCGCTACGGTAACCAACTTCCCACACGGTAACGACGACATCG
ACATCGCGCTGGCAGAAACCCGTGCGGCAATCGCCTACGGTGCTGATGAA
GTTGACGTTGTGTTCCCGTACCGCGCGCTGATGGCGGGTAACGAGCAGGT
TGGTTTTGACCTGGTGAAAGCCTGTAAAGAGGCTTGCGCGGCAGCGAATG
TACTGCTGAAAGTGATCATCGAAACCGGCGAACTGAAAGACGAAGCGCTG
ATCCGTAAAGCGTCTGAAATCTCCATCAAAGCGGGTGCGGACTTCATCAA
AACCTCTACCGGTAAAGTGGCTGTGAACGCGACGCCGGAAAGCGCGCGCA
TCATGATGGAAGTGATCCGTGATATGGGCGTAGAAAAAACCGTTGGTTTC
AAACCGGCGGGCGGCGTGCGTACTGCGGAAGATGCGCAGAAATATCTCGC
CATTGCAGATGAACTGTTCGGTGCTGACTGGGCAGATGCGCGTCACTACC
GCTTTGGCGCTTCCAGCCTGCTGGCAAGCCTGCTGAAAGCGCTGGGTCAC
GGCGACGGTAAGAGCGCCAGCAGCTACTAA.

[0436] In some embodiments the B. Caldolyticus pentose-phosphate aldolase is encoded by a nucleic acid sequence having at least 70% sequence identity, at least 80% sequence identity, or at least 90% sequence identity to:

(SEQ ID NO: 286)
ATGACGATGAATATCGCGAAAATGATCGATCATACGCTGCTCAAACCGGA
AGCGACAGAACAACAAATCGTGCAACTGTGCACGGAAGCAAAGCAATACG
GCTTTGCTGCCGTGTGCGTCAACCCAACGTGGGTGAAAACGGCGGCGCGC
GAGCTTTCCGGCACGGATGTCCGCGTCTGCACGGTCATCGGCTTTCCACT
TGGGGCAACGACGCCGGAAACAAAGGCGTTTGAAACAACGAACGCCATCG
AAAACGGCGCTCGCGAAGTCGACATGGTGATCAACATCGGTGCGTTAAAA
AGCGGGCAAGACGAGCTTGTCGAGCGCGACATTCGTGCGGTTGTCGAAGC
GGCGGCTGGCAGGGCGCTTGTCAAAGTGATCGTTGAAACGGCGCTTTTGA
CCGATGAGGAAAAAGTGCGCGCCTGCCAGCTCGCAGTGAAAGCCGGCGCT
GATTATGTGAAAACGTCGACCGGGTTTTCCGGCGGAGGTGCGACGGTGGA
GGATGTGGCGCTGATGCGGAAAACGGTCGGCGACAGAGCAGGCGTCAAAG
CATCAGGCGGCGTCCGTGACTGGAAAACCGCTGAGGCGATGATCAACGCC
GGCGCGACGCGCATCGGCACAAGCTCTGGGGTGGCGATCGTCACCGGCGG
GACGGGCCGCGCTGACTACTAA.

[0437] In some embodiments the B. Caldolyticus pentose-phosphate aldolase is encoded by a cDNA optimized sequence comprising a nucleic acid sequence having at least 70% sequence identity, at least 80% sequence identity, or at least 90% sequence identity to:

(SEQ ID NO: 287)
CCATGGCAAACATCGCGAAGATGATTGACCACACCCTGCTGAAACCG
GAGGCGACCGAACAGCAAATCGTTCAGCTGTGCACCGAGGCGAAACAAT
ACGGCTTCGCGGCGGTGTGCGTTAACCCGACCTGGGTTAAGACCGCGGC
GCGTGAACTGAGCGGTACCGACGTGCGTGTTTGCACCGTGATTGGTTTC
CCGCTGGGTGCGACCACCCCGGAGACCAAAGCGTTTGAAACCACCAACG
CGATTGAGAACGGCGCGCGTGAAGTTGATATGGTGATCAACATTGGCGC
GCTGAAGAGCGGTCAGGACGAGCTGGTTGAGCGTGATATTCGTGCGGTG
GTTGAGGCTGCGGCGGGTCGTGCGCTGGTGAAAGTTATTGTGGAAACCG
CGCTGCTGACCGACGAGGAAAAAGTGCGTGCGTGCCAACTGGCGGTTAA
GGCGGGTGCGGATTACGTGAAAACCAGCACCGGTTTTAGCGGTGGCGGT
GCGACCGTTGAGGATGTGGCGCTGATGCGTAAGACCGTTGGCGATCGTG
CGGGTGTGAAAGCGAGCGGCGGTGTTCGTGACTGGAAGACCGCGGAAGC
GATGATCAACGCGGGTGCGACCCGTATTGGTACCAGCAGCGGTGTTGCG
ATTGTGACCGGCGGTACCGGTCGTGCGGATTATAAGCTT.

[0438] In some embodiments, the E. Coli pentose-phosphate aldolase is an amino acid sequence having at least 70% sequence identity, at least 80% sequence identity, or at least 90% sequence identity to:

(SEQ ID NO: 256)
MTDLKASSLRALKLMDLTTLNDDDTDEKVIALCHQAKTPVGNTAAICI
YPRFIPIARKTLKEQGTPEIRIATVTNFPHGNDDIDIALAETRAAIAY
GADEVDVVFPYRALMAGNEQVGFDLVKACKEACAAANVLLKVIIETGE
LKDEALIRKASEISIKAGADFIKTSTGKVAVNATPESARIMMEVIRDM
GVEKTVGFKPAGGVRTAEDAQKYLAIADELFGADWADARHYRFGASSL
LASLLKALGHGDGKSASSY.

[0439] In some embodiments, the E. Coli pentose-phosphate aldolase is an amino acid sequence comprises a C47N mutation and comprises:

(SEQ ID NO: 299)
MTDLKASSLRALKLMDLTTLNDDDTDEKVIALCHQAKTPVGNTAAINI
YPRFIPIARKTLKEQGTPEIRIATVTNFPHGNDDIDIALAETRAAIAY
GADEVDVVFPYRALMAGNEQVGFDLVKACKEACAAANVLLKVIIETGE
LKDEALIRKASEISIKAGADFIKTSTGKVAVNATPESARIMMEVIRDM
GVEKTVGFKPAGGVRTAEDAQKYLAIADELFGADWADARHYRFGASSL
LASLLKALGHGDGKSASSY.

[0440] In some embodiments, B. Caldolyticus pentose-phosphate aldolase is an amino acid sequence having at least 70% sequence identity, at least 80% sequence identity, or at least 90% sequence identity to:

(SEQ ID NO: 297)
MTMNIAKMIDHTLLKPEATEQQIVQLCTEAKQYGFAAVCVNPTWVKTA
ARELSGTDVRVCTVIGFPLGATTPETKAFETTNAIENGAREVDMVINI
GALKSGQDELVERDIRAVVEAAAGRALVKVIVETALLTDEEKVRACQL
AVKAGADYVKTSTGFSGGGATVEDVALMRKTVGDRAGVKASGGVRDWK
TAEAMINAGATRIGTSSGVAIVTGGTGRADY

[0441] In some embodiments the B. Caldolyticus pentose-phosphate aldolase comprises a mutation C37N mutation and is encoded by a nucleic acid sequence having at least 70% sequence identity, at least 80% sequence identity, or at least 90% sequence identity to:

(SEQ ID NO: 286)
ATGACGATGAATATCGCGAAAATGATCGATCATACGCTGCTCAAACCG
GAAGCGACAGAACAACAAATCGTGCAACTGTGCACGGAAGCAAAGCAA
TACGGCTTTGCTGCCGTGTGCGTCAACCCAACGTGGGTGAAAACGGCG
GCGCGCGAGCTTTCCGGCACGGATGTCCGCGTCTGCACGGTCATCGGC
TTTCCACTTGGGGCAACGACGCCGGAAACAAAGGCGTTTGAAACAACG
AACGCCATCGAAAACGGCGCTCGCGAAGTCGACATGGTGATCAACATC
GGTGCGTTAAAAAGCGGGCAAGACGAGCTTGTCGAGCGCGACATTCGT
GCGGTTGTCGAAGCGGCGGCTGGCAGGGCGCTTGTCAAAGTGATCGTT
GAAACGGCGCTTTTGACCGATGAGGAAAAAGTGCGCGCCTGCCAGCTC
GCAGTGAAAGCCGGCGCTGATTATGTGAAAACGTCGACCGGGTTTTCC
GGCGGAGGTGCGACGGTGGAGGATGTGGCGCTGATGCGGAAAACGGTC
GGCGACAGAGCAGGCGTCAAAGCATCAGGCGGCGTCCGTGACTGGAAA
ACCGCTGAGGCGATGATCAACGCCGGCGCGACGCGCATCGGCACAAGC
TCTGGGGTGGCGATCGTCACCGGCGGGACGGGCCGCGCTGACTACTA
A.

[0442] In some embodiments, B. Caldolyticus pentose-phosphate aldolase comprises a mutation C37N mutation and is an amino acid sequence having at least 70% sequence identity, at least 80% sequence identity, or at least 90% sequence identity to:

(SEQ ID NO: 298)
MTMNIAKMIDHTLLKPEATEQQIVQLCTEAKQYGFAAVNVNPTWVKTA
ARELSGTDVRVCTVIGFPLGATTPETKAFETTNAIENGAREVDMVINI
GALKSGQDELVERDIRAVVEAAAGRALVKVIVETALLTDEEKVRACQL
AVKAGADYVKTSTGFSGGGATVEDVALMRKTVGDRAGVKASGGVRDWK
TAEAMINAGATRIGTSSGVAIVTGGTGRADY

### 6-Phosphofructokinase (EC 2.7.1.11)

[0443] Phosphofructokinase (Pfk) catalyzes the phosphorylation of fructose-6-phosphate on the C1 carbon during glycolysis. E. coli contains two Pfk isozymes, Pfk-1 (pfkA) and Pfk-2 (pfkB), which do not share sequence similarity. More than 90% of the phosphofructokinase activity present in wild type E. coli can be attributed to Pfk-1.

[0444] PfkA catalyzes the phosphorylation of fructose-6-phosphate and is a key enzyme regulating the glycolysis pathway. The enzyme cannot catalyze the reverse reaction in vivo. The enzyme shows cooperative kinetics with the substrate fructose-6-phosphate, but not with the other substrate, ATP. Recently, it was shown that PfkA also catalyzes phosphorylation of sedoheptulose-7-phosphate as part of the sedoheptulose bisphosphate bypass. Crystal structures of PfkA have been solved with and without activators and inhibitors. Based on sequence similarity, PfkA was predicted to be an NAD+ kinase.

[0445] PfkB is a member of the ribokinase family of sugar kinases. PfkB, unlike PfkA, does not show cooperative interaction with fructose-6-phosphate, inhibition by PEP or activation by ADP. MgATP²⁻ is the true substrate of the enzyme. PfkB can also use tagatose-6-phosphate as a substrate. This reaction is part of the galactitol catabolism pathway. A crystal structure of PfkB in the tetrameric form inhibited by MgATP has been solved at 1.98 Å resolution. Comparison of this structure with a crystal structure of PfkB in complex with fructose-6-phosphate suggests negative interplay between fructose-6-phosphate binding and MgATP binding.

[0446] In some embodiments, a recombinant microorganism producing MEG or glycolic acid, or MEG and one or more co-product, comprises a deletion, insertion, or loss of function mutation in a gene encoding a 6-phosphofructokinase to prevent the conversion of fructose-6-phosphate to 1,6-bisphosphate and instead allow fructose-6-phosphate to be converted to erythrose-4-phosphate and acetyl-phosphate by a fructose-6-phosphate phosphoketolase, and provide more erythrose-4-phosphate for the non-oxidative branch of the pentose phosphate pathway to further produce D-ribose 5-phosphate intermediate, which can be converted by a D-ribose 5-phosphate aldolase into the intermediates glycoladehyde and D-glyceraldehyde 3-phosphate (G3P) needed for the production of MEG or glycolic acid, or MEG and one or more co-product. In some embodiments, the 6-phosphofructokinase is pfkA and/or pfkB.

### Hydroxypyruvate Decarboxylase, 2-Oxoglutarate Decarboxylase, 2-Keto Acid Decarboxylase (EC 4.1.1.-)

[0447] The present disclosure describes enzymes that can catalyze the following reactions:

hydroxypyruvate+H+↔CO₂+glycolaldehyde

2-oxoglutarate+coenzyme A+NAD+→succinyl-CoA+CO₂+NADH

4-methyl-2-oxopentanoate+H+→3-methylbutanal+CO2

3-methyl-2-oxobutanoate+H+→isobutanal+CO2

[0448] Hydroxypyruvate decarboxylase may also be known as hydroxypyruvate carboxy-lyase.

[0449] 2-oxoglutarate decarboxylase may also be known as oxoglutarate decarboxylase; alpha-ketoglutarate decarboxylase; alpha-ketoglutaric decarboxylase; pre-2-oxoglutarate decarboxylase; 2-oxoglutarate carboxy-lyase.

[0450] E. coli SucA is responsible for the 2-oxoglutarate decarboxylase activity of the 2-oxoglutarate dehydrogenase multienzyme complex (OGDHC) that catalyzes the conversion of 2-oxoglutarate (2-ketoglutarate) to succinyl-CoA and CO₂, with the production of NADH.

[0451] The OGDHC is a member of the 2-oxo acid dehydrogenase family. Members of this family contain multiple copies of three enzymatic components: 2-oxoglutarate decarboxylase (E1), lipoamide acyltransferase (E2) and lipoamide dehydrogenase (E3). In most Gram-positive bacteria and in mitochondria the E1 component is a heterodimer composed of two subunits, while in most (but not all) Gram-negative bacteria it is made up of a single type of subunit. In both cases multiple copies of the E1 component along with multiple copies of the E3 component are assembled around an E2 core of 24 subunits with octahedral symmetry, or 60 subunits with eicosahedral symmetry (depending on which complex and species). In E. coli the E3 component is shared with the pyruvate dehydrogenase and glycine cleavage multi-enzyme complexes. E1 and E2 differ slightly for the 2-oxoglutarate and pyruvate dehydrogenase complexes, and are designated (o) and (p) to distinguish them.

[0452] The E. coli OGDHC contains 12 units of the E1(o) component 2-oxoglutarate decarboxylase, thiamine-requiring encoded by sucA, 24 units of the E2(o) comoponent dihydrolipoyltranssuccinylase encoded by sucB, and 2 units of the E3 component lipoamide dehydrogenase encoded by Ipd. The 24 E2(o) units form the octahedral core of the complex. They contain lipoyllysine and binding sites for dimers of the E1 (o) and E3 subunits. Electron cryotomography showed that they are flexibly tethered to the E2 core.

[0453] During the OGDHC reaction cycle, 2-oxoglutarate is bound and decarboxylated by SucA, a thiamin-diphosphate cofactor containing enzyme. The crystal structure of a truncated, apo form of SucA lacking the N-terminal 77 residues has been determined at 2.6 Å resolution. The structure of the holo form with thiamin diphosphate and Mg²⁺ was determined at 3.5 Å resolution. The truncated form retained decarboxylase activity but did not assemble with E2(o) into an OGDH complex. Data also suggested the presence of an AMP binding site. An oxygen-dependent thiamin free radical was demonstrated in the OGDHC, which was generated by a side reaction with O₂.

[0454] Studies of engineered SucA prepared by saturation mutagenesis of His260 and His298 suggested that His260 is required for substrate recognition, but His298 could be replaced by hydrophobic residues of similar size. Data also suggested that E2(o) has a role in specificity.

[0455] The sucA gene was cloned and sequenced in earlier work and regulation of sucABCD was studied. The sucAB and sucCD genes were shown to be mutually essential, with either pair sufficient to produce succinyl-CoA, but simultaneous deletion of sucAB and sucCD was not viable.

[0456] α-ketoisovalerate decarboxylase catalyzes the decarboxylation of 3-methyl-2-oxobutanoate to isobutanal. The enzyme is highly specific for 3-methyl-2-oxobutanoate, but also shows activity with other branched-chain 2-keto acids (4-methyl-2-oxopentanoate, 22.7% relative activity; (S)-3-methyl-2-oxopentanoate, 16.7%, 2-oxo-3-phenylpropanoate, 7.1% and 4-(methylthio)-2-oxobutanoate, 5.8%.

[0457] The enzyme is a homo-tetramer, encoded by the kivd gene, which has been sequenced and cloned. The deduced protein sequence shares 98.6% identity (over its first 438 amino acids) with an L. lactis strain IL1403 protein, encoded by the ipd gene (this gene is interrupted at position L439 by the insertion of an IS983 element). The kivd gene does not have any homology with any gene(s) in the sequenced genomes of L. lactis strains MG1363 and SK11.

[0458] A study of the Kivd activity testing 156 lactic acid bacteria strains (Lactococcus, Lactobacillus, Leuconostoc) indicated that only L. lactis strains possess the activity, and even within lactococcal strains, only 7 out of 45 strains had the activity.

[0459] A homologous protein has been described from L. lactis strain B1157 as branched-chain α-keto acid decarboxylase. That protein shows 89.8% identity with Kivd and also has a preference for 2-keto-isovalerate.

[0460] In some embodiments, an enzyme having 2-keto acid decarboxylase activity, an enzyme having hydroxypyruvate decarboxylase activity or an enzyme having 2-oxoglutarate decarboxylase activity converts hydroxypyruvate to glycolaldehyde. In some embodiments, the enzyme that converts hydroxypyruvate to glycolaldehyde is encoded by an amino acid sequence having at least 70% sequence identity, having at least 80% sequence identity, or having at least 90% sequence identity to Kivd or SucA. In some embodiments, the enzyme having 2-keto acid decarboxylase activity is Kivd. In some embodiments, the enzyme having 2-oxoglutarate decarboxylase activity is SucA.

[0461] In some embodiments, the one or more nucleic acid molecules encoding the enzyme having 2-oxoglutarate decarboxylase activity is sucA, or homolog thereof. In some embodiments, the one or more nucleic acid molecules encoding the enzyme having 2-keto acid decarboxylase activity is Kivd, or homolog thereof. In another embodiment, the one or more nucleic acid molecules encoding an enzyme having 2-keto acid decarboxylase activity, an enzyme having hydroxypyruvate decarboxylase activity or an enzyme having 2-oxoglutarate decarboxylase activity comprise an amino acid sequence selected from SEQ ID NOs: 224 and 226. In a further embodiment, the one or more nucleic acid molecule encoding an enzyme having 2-keto acid decarboxylase activity, an enzyme having hydroxypyruvate decarboxylase activity or an enzyme having 2-oxoglutarate decarboxylase activity is encoded by a nucleic acid sequence selected from SEQ ID NOs: 223 and 225.

### 2-Oxoqlutarate Reductase, 3-Phospho-Hydroxypyruvate Reductase, 3-Phosphoglycerate Dehydrogenase (EC 1.1.1.-)

[0462] The present disclosure describes enzymes that can catalyze the following reactions:

(S)-2-hydroxyglutarate+NAD+↔2-oxoglutarate+NADH+H+

3-phospho-D-glycerate+NAD+↔3-phospho-hydroxypyruvate+NADH+H+

(R)-2-hydroxyglutarate+NAD+↔2-oxoglutarate+NADH+H+

[0463] 3-phosphoglycerate dehydrogenase may also be known as phosphoglycerate dehydrogenase; PHGDH (gene name); D-3-phosphoglycerate:NAD+ oxidoreductase; alpha-phosphoglycerate dehydrogenase; 3-phosphoglyceric acid dehydrogenase; D-3-phosphoglycerate dehydrogenase; glycerate 3-phosphate dehydrogenase; glycerate-1,3-phosphate dehydrogenase; phosphoglycerate oxidoreductase; phosphoglyceric acid dehydrogenase; SerA; 3-phosphoglycerate:NAD+2-oxidoreductase; SerA 3PG dehydrogenase; 3PHP reductase.

[0464] 3-phosphoglycerate dehydrogenase catalyzes the first committed step in the biosynthesis of L-serine. The enzyme is regulated by allosteric end-product inhibition that shows cooperativity. Inhibition by serine acts primarily through reduction of catalytic velocity and has only a small effect on the Kms of the substrates; SerA is thus classified as a type V allosteric enzyme.

[0465] The basis for allosteric and cooperative inhibition by serine has been studied extensively. Occupation of two of the four serine binding sites in the homotetramer results in 85% inhibition of activity. Further binding of serine shows negative cooperativity. Phosphate is able to reduce the site-to-site cooperative effects on serine binding; the effect was mainly due to the presence of intrinsically bound NADH. A Trp139Gly mutation results in a homodimeric enzyme that has lost cooperativity in serine binding and allosteric inhibition. Site-directed mutagenesis of residues within the effector binding site, the regulatory interface between subunits, and a flexible hinge region support a model where movement of adjacent domains is involved in inhibition of the enzymatic activity. Transient kinetic analysis showed that the cooperativity of inhibition of catalytic activity results from a conformational change due to serine binding. An enzyme missing the regulatory domain is no longer inhibited by serine, but other kinetic parameters remain the same. Hybrid tetramers provided further insight into the mechanism of allosteric inhibition.

[0466] Site-directed mutagenesis has allowed the identification of residues within the active site that contribute to substrate binding and catalysis. Mutations in the hinge region between the substrate and nucleotide binding domains affect the kcat of the enzyme; certain mutations uncouple serine binding and catalytic inhibition.

[0467] Extensive site-directed mutagenesis and structural studies have contributed to a detailed view of the interactions between allosteric regulation, cooperativity and catalytic activity. Further insight into the catalytic pathway was provided by stopped-flow kinetic analysis, indicating that the rate-limiting step in both catalytic directions is a conformational change of the enzyme. Serine binding appears to lead to the formation of a dead-end quaternary complex between the enzyme, coenzyme, substrate, and effector that eliminates the conformational change subsequent to substrate binding.

[0468] The enzyme has been shown to also have an α-ketoglutarate reductase activity, producing 2-hydroxyglutarate. While the metabolic role of this reaction is not yet known, it is thought that it may play a role in regulating serine biosynthesis and in recycling NADH back to NAD+, especially during anaerobiosis.

[0469] Crystal structures of the wild type enzyme and various mutants have been solved. The structure showed that each subunit of the homotetramer consists of three distinct domains, a nucleotide binding domain, a substrate binding domain, and a regulatory/serine binding domain.

[0470] serA is essential for growth on glycerol minimal medium; the growth defect can be rescued by addition of serine.

[0471] In some embodiments, the enzyme having 3-phosphoglycerate dehydrogenase activity can be an enzyme having 3-phospho-hydroxypyruvate reductase activity or an enzyme having 2-oxoglutarate reductase activity. In some embodiments, an enzyme having 3-phosphoglycerate dehydrogenase activity, an enzyme having 3-phospho-hydroxypyruvate reductase activity, or an enzyme having 2-oxoglutarate reductase activity catalyzes the conversion of glycerate 3-phosphate to 3-phosphohydroxypyruvate. In some embodiments, an enzyme having 3-phosphoglycerate dehydrogenase activity, an enzyme having 3-phospho-hydroxypyruvate reductase activity, or an enzyme having 2-oxoglutarate reductase activity is encoded by an amino acid sequence having at least 70% sequence identity, having at least 80% sequence identity, or having at least 90% sequence identity to serA. In some embodiments, the enzyme having 3-phosphoglycerate dehydrogenase activity, the enzyme having 3-phospho-hydroxypyruvate reductase activity, or the enzyme having 2-oxoglutarate reductase activity is serA.

[0472] In some embodiments, the one or more nucleic acid molecules encoding the enzyme having 3-phosphoglycerate dehydrogenase activity is serA, or homolog thereof. In another embodiment, the one or more nucleic acid molecules encoding an enzyme having 3-phosphoglycerate dehydrogenase activity, an enzyme having 3-phospho-hydroxypyruvate reductase activity, or an enzyme having 2-oxoglutarate reductase activity comprises an amino acid sequence set forth in SEQ ID NO: 228. In a further embodiment, the one or more nucleic acid molecule encoding an enzyme having 3-phosphoglycerate dehydrogenase activity, an enzyme having 3-phospho-hydroxypyruvate reductase activity, or an enzyme having 2-oxoglutarate reductase activity is encoded by a nucleic acid sequence set forth in SEQ ID NO: 227.

### 3-Phosphoserine Aminotransferase, Serine Aminotransferase, L-Serine Transaminase (EC 2.6.1.52)

[0473] The present disclosure describes enzymes that can catalyze the following reactions:

3-phospho-L-serine+2-oxoglutarate↔L-glutamate+3-phospho-hydroxypyruvate

(3R)-3-hydroxy-2-oxo-4phosphonooxybutanoate+L-glutamate→4-phospho-hydroxy-L-threonine+2-oxoglutarate

2-oxoglutarate+N-succinyl-L,L-2,6-diaminopimelate→L-glutamate+N-succinyl-2-amino-6-ketopimelate

[0474] 3-phosphoserine aminotransferase may also be known as phosphoserine transaminase; PSAT; phosphoserine aminotransferase; hydroxypyruvic phosphate-glutamic transaminase; L-phosphoserine aminotransferase; phosphohydroxypyruvate transaminase; phosphohydroxypyruvic-glutamic transaminase; 3-O-phospho-L-serine:2-oxoglutarate aminotransferase; SerC; PdxC; 3PHP transaminase

[0475] The serC-encoded enzyme, phosphoserine/phosphohydroxythreonine aminotransferase, functions in the biosythesis of both serine and pyridoxine, by using different substrates. Pyridoxal 5′-phosphate is a cofactor for both enzyme activities, suggesting that it can act in an autocatalytic fashion, stimulating its own biosynthesis.

[0476] The redundancy and promiscuity among aminotransferase enzymes has been investigated. No activity could be observed with non-phosphorylated substrates; however, 3-hydroxypyruvate was able to be used as the substrate for an assay of SerC enzymatic activity. In addition, genetic experiments showed that SerC is a minor alanine transaminase.

[0477] The normal activities of two enzymes, ArgD and SerC, are sufficient for succinyldiaminopimelate (SDAP) and lysine biosynthesis; a third enzyme, AstC, is sufficient for SDAP biosynthesis, but alone can not fulfill the cell's requirement for lysine. Additional enzymes, including GabT and PuuE, may be able to contribute to SDAP biosynthesis. Expression of argD, astC, serC, aspC, gabT, hisC, ilvE, patA, puuE, or tyrB from a plasmid allows growth of the triple AargD serC astC mutant on minimal medium.

[0478] Crystal structures of the enzyme in the unligated form and in complex with the substrate analog α-methyl-L-glutamate have been solved, and a molecular reaction mechanism was proposed.

[0479] serC is essential for growth on glycerol minimal medium; the growth defect can be rescued by addition of serine and pyridoxol/pyridoxine.

[0480] In some embodiments, the enzyme having phosphoserine aminotransferase activity can be an enzyme having L-serine transaminase activity or an enzyme having serine aminotransferase activity. In some embodiments, an enzyme having phosphoserine aminotransferase activity, an enzyme having L-serine transaminase activity or an enzyme having serine aminotransferase activity catalyzes the conversion of L-serine to hydroxypyruvate. In some embodiments, the enzyme having phosphoserine aminotransferase activity, the enzyme having L-serine transaminase activity or the enzyme having serine aminotransferase activity is encoded by an amino acid sequence having at least 70% sequence identity, having at least 80% sequence identity, or having at least 90% sequence identity to serC. In some embodiments, the enzyme having phosphoserine aminotransferase activity, the enzyme having L-serine transaminase activity or the enzyme having serine aminotransferase activity is serC.

[0481] In some embodiments, the one or more nucleic acid molecules encoding the enzyme having phosphoserine aminotransferase activity is serC, or homolog thereof. In another embodiment, the one or more nucleic acid molecules encoding an enzyme having phosphoserine aminotransferase activity, an enzyme having L-serine transaminase activity, or an enzyme having serine aminotransferase activity comprise an amino acid sequence set forth in SEQ ID NO: 230. In a further embodiment, the one or more nucleic acid molecule encoding an enzyme having phosphoserine aminotransferase activity, an enzyme having L-serine transaminase activity or an enzyme having serine aminotransferase activity is encoded by a nucleic acid sequence set forth in SEQ ID NO: 229.

### 3-Phospho-Hydroxypyruvate Phosphatase

[0482] The present disclosure describes enzymes that can catalyze the following reaction:

3-phospho-hydroxypyruvate+H₂O→hydroxypyruvate+phosphate

[0483] YeaB (NudL) belongs to the Nudix family of hydrolases and was predicted to have CoA pyrophosphohydrolase activity.

[0484] yeaB (nudL) was isolated as a multicopy suppressor of the repression of flhDC transcription in a pgsA mutant. The suppression may be due to the reduction of σ^{s} expression in cells that overexpress nudL.

[0485] yeaB (nudL) was also isolated as a multicopy suppressor of the PLP auxotrophy of a pdxB deletion strain. NudL was found to be part of a serendipitous metabolic pathway that produces an intermediate of the pyridoxal 5′-phosphate biosynthesis I pathway, 4-phospho-hydroxy-L-threonine, that lies downstream of PdxB. The pathway diverts 3-phosphohydroxypyruvate from serine biosynthesis. With a K_{cat} of 5.7×10⁻⁵, NudL is an inefficient catalyst of the conversion of 3-phosphohydroxypyruvate to hydroxypyruvate, but its activity appears to be sufficient for production of PLP.

[0486] In some embodiments, the enzyme having 3-phospho-hydroxypyruvate phosphatase activity is encoded by an amino acid sequence having at least 70% sequence identity, having at least 80% sequence identity, or having at least 90% sequence identity to yeaB. In some embodiments, the enzyme having 3-phospho-hydroxypyruvate phosphatase activity is yeaB.

[0487] In some embodiments, the one or more nucleic acid molecules encoding the enzyme having 3-phospho-hydroxypyruvate phosphatase activity is yeaB, or homolog thereof. In another embodiment, the one or more nucleic acid molecules encoding an enzyme having 3-phospho-hydroxypyruvate phosphatase activity comprise an amino acid sequence set forth in SEQ ID NO: 232. In a further embodiment, the one or more nucleic acid molecule encoding an enzyme having 3-phospho-hydroxypyruvate phosphatase activity is encoded by a nucleic acid sequence set forth in SEQ ID NO: 231.

### Phosphoserine Phosphatase (EC 3.1.3.3)

[0488] The present disclosure describes enzymes that can catalyze the following reaction:

3-phospho-L-serine+H₂O→L-serine+phosphate

[0489] Phosphoserine phosphatase catalyzes the last step in serine biosynthesis. The enzyme belongs to the superfamily of haloacid dehalogenase (HAD)-like hydrolases. Enzymatic studies were originally performed using partially purified enzyme from E. coli strain W; assays of the purified enzyme were performed as part of an investigation of the HAD superfamily of enzymes.

[0490] serB is essential for growth on glycerol minimal medium; the growth defect can be rescued by addition of serine. Gph, HisB and YtjC were identified as multicopy suppressors of the conditional AserB phenotype. Directed evolution experiments identified mutations that increased fitness and enzymatic activity of these suppressors.

[0491] In some embodiments, the enzyme having phosphoserine phosphatase activity is encoded by an amino acid sequence having at least 70% sequence identity, having at least 80% sequence identity, or having at least 90% sequence identity to serB. In some embodiments, the enzyme having phosphoserine phosphatase activity is serB.

[0492] In some embodiments, the one or more nucleic acid molecules encoding the enzyme having phosphoserine phosphatase activity is serB, or homolog thereof. In another embodiment, the one or more nucleic acid molecules encoding an enzyme having phosphoserine phosphatase activity comprise an amino acid sequence set forth in SEQ ID NO: 234. In a further embodiment, the one or more nucleic acid molecule encoding an enzyme having phosphoserine phosphatase activity is encoded by a nucleic acid sequence set forth in SEQ ID NO: 233.

### Serine-Pyruvate Aminotransferase (EC 2.6.1.51)

[0493] The present disclosure describes enzymes that can catalyze the following reactions:

pyruvate+L-serine↔L-alanine+hydroxypyruvate

glyoxylate+L-alanine↔glycine+pyruvate

[0494] Serine-pyruvate aminotransferase may also be known as alanine-glyoxylate aminotransferase.

[0495] The peroxisomal serine-pyruvate aminotransferase (AGXT1) and mitochondrially localized alanine-glyoxylate aminotransferase 2 (AGXT2) both catalyze the conversion of glyoxylate to glycine using alanine as the amino donor. Unlike AGXT2, AGXT1 cannot utilize asymmetric dimethylarginine (ADMA) as an amino donor.

[0496] Peroxisomal serine-pyruvate aminotransferase is a pyridoxal phosphate dependent liver specific enzyme composed of a homodimer. Its location in the peroxisome is crucial for proper enzyme activity. A peroxisomal targeting sequence (PTS1) at the C-terminus is required for translocation into peroxisomes.

[0497] Dysfunction or mistargeting of serine-pyruvate aminotransferase leading to absence in hepatic peroxisomes, causes glyoxylate to escape into the cytosol where it is further metabolized to oxalate and glycolate. Oxalate cannot be further metabolized in humans and leads to the formation of insoluble calcium oxalate in the kidney and urinary tract. Mutations in the AGXT1 gene leads to improper peroxisomal targeting and causes the autosomal recessive metabolic disorder, primary hyperoxaluria type 1, which results in irreversible kidney damage. One-third of primary hyperoxaluria type 1 patients have a unique protein sorting defect in which the hepatic peroxisomal enzyme is mistargeted to the mitochondria.

[0498] In some embodiments, the enzyme having serine-pyruvate aminotransferase activity is encoded by an amino acid sequence having at least 70% sequence identity, having at least 80% sequence identity, or having at least 90% sequence identity to Homo sapiens AGXT1. In some embodiments, the enzyme having serine-pyruvate aminotransferase activity is Homo sapiens AGXT1.

[0499] In some embodiments, the one or more nucleic acid molecules encoding the enzyme having serine-pyruvate aminotransferase activity is AGXT1, or homolog thereof. In some embodiments, the one or more nucleic acid molecules encoding an enzyme having serine-pyruvate aminotransferase activity comprise an amino acid sequence set forth in SEQ ID NO: 244. In a further embodiment, the one or more nucleic acid molecule encoding an enzyme having serine-pyruvate aminotranserase activity is encoded by a nucleic acid sequence set forth in SEQ ID NO: 243.

### Serine Decarboxylase (EC 4.1.1.65)

[0500] The present disclosure describes enzymes that can catalyze the following reaction:

a 3-O-sn-phosphatidyl-L-serine+H+→an L-1-phosphatidylethanolamine+CO₂

[0501] Serine decarboxylase may also be known as phosphatidylserine decarboxylase; PS decarboxylase; phosphatidyl-L-serine carboxy-lyase.

[0502] Phosphatidylserine decarboxylase is one of a small class of enzymes that use a covalently bound pyruvoyl prosthetic group. The pyruvoyl group is thought to act analogously to pyridoxal phosphate cofactor by forming a Schiff base with the amino group of the substrate and then serving as an electron sink to facilitate the decarboxylation.

[0503] Four of these enzymes, histidine decarboxylase (E.C. 4.1.1.22), phosphatidylserine decarboxylase, aspartate 1-decarboxylase, and S-adenosylmethionine decarboxylase are decarboxylases forming important biological amines. All of these enzymes are known to have the pyruvoyl prosthetic group attached via an amide linkage to the amino terminus of the α subunit. Two other enzymes in this group are are D-proline reductase and glycine reductase (E.C. 1.21.4.2).

[0504] Pyruvoyl-containing enzymes are expressed as a zymogen which is processed post-translationally by a self-maturation cleavage called serinolysis. In this process the pyruvoul group is formed from a serine residue, splitting the presursor protein into two parts which become the α and β subunits. In some cases additional subunits may be involved.

[0505] This enzyme differs from other pyruvoyl-dependent decarboxylases composed of nonidentical subunits in that the pyruvate prosthetic group is associated with the smaller subunit. The enzyme is a multimer of unknown number of the heterodimer.

[0506] In some embodiments, an enzyme having serine decarboxylase activity catalyzes the conversion of L-serine to ethanolamine.

[0507] In some embodiments, the enzyme having serine decarboxylase activity is encoded by an amino acid sequence having at least 70% sequence identity, having at least 80% sequence identity, or having at least 90% sequence identity to Arabidopsis thaliana SDC. In some embodiments, the enzyme having serine decarboxylase activity is Arabidopsis thaliana SDC.

[0508] In some embodiments, the one or more nucleic acid molecules encoding the enzyme having serine decarboxylase activity is SDC, or homolog thereof. In some embodiments, the one or more nucleic acid molecules encoding an enzyme having serine decarboxylase activity comprise an amino acid sequence set forth in SEQ ID NO: 236. In a further embodiment, the one or more nucleic acid molecule encoding an enzyme having serine decarboxylase activity is encoded by a nucleic acid sequence set forth in SEQ ID NO: 235.

### Ethanolamine Oxidoreductase (Deaminating) (EC 1.4.3.8), Ethanolamine Aminotransferase (EC 2.6.1.-)

[0509] The present disclosure describes enzymes that can catalyze the following reactions:

ethanolamine+oxygen+H₂O→ammonium+hydrogen peroxide+glycolaldehyde

ethanolamine+2-oxoglutarate→glycolaldehyde+L-glutamate

[0510] Ethanolamine oxidoreductase (deaminating) may also be known as ethanolamine oxidase. This enzyme belongs to the family of oxidoreductases, specifically those acting on the CH—NH₂ group of donors with oxygen as acceptor.

[0511] In some embodiments, an ethanolamine oxidase or an ethanolamine aminotransferase catalyzes the conversion of ethanolamine to gylcolaldehyde.

[0512] In some embodiments, the enzyme having ethanolamine oxidase activity is encoded by an amino acid sequence having at least 70% sequence identity, having at least 80% sequence identity, or having at least 90% sequence identity to E. coli tynA. In some embodiments, the enzyme having ethanolamine oxidase activity is E. coli tynA.

[0513] In some embodiments, the one or more nucleic acid molecules encoding the enzyme having ethanolamine oxidase activity is tynA, or homolog thereof. In some embodiments, the one or more nucleic acid molecules encoding an enzyme having ethanolamine oxidase activity comprise an amino acid sequence set forth in SEQ ID NO: 238. In a further embodiment, the one or more nucleic acid molecule encoding an enzyme having ethanolamine oxidase activity is encoded by a nucleic acid sequence set forth in SEQ ID NO: 237.

[0514] In some embodiments, the enzyme having ethanolamine aminotransferase activity is encoded by an amino acid sequence having at least 70% sequence identity, having at least 80% sequence identity, or having at least 90% sequence identity to E. coli alaA. In some embodiments, the enzyme having ethanolamine aminotransferase activity is E. coli alaA.

[0515] In some embodiments, the one or more nucleic acid molecules encoding the enzyme having ethanolamine aminotransferase activity is alaA, or homolog thereof. In some embodiments, the one or more nucleic acid molecules encoding an enzyme having ethanolamine aminotransferase activity comprise an amino acid sequence set forth in SEQ ID NO: 240. In a further embodiment, the one or more nucleic acid molecule encoding an enzyme having ethanolamine aminotransferase activity is encoded by a nucleic acid sequence set forth in SEQ ID NOs: 239.

### Hydroxypyruvate Reductase (EC 1.1.1.-)

[0516] The present disclosure describes enzymes that can catalyze the following reactions:

D-glycerate+NAD(P)+↔hydroxypyruvate+NAD(P)H+H+

[0517] Hydroxypyruvate reductase may also be known as beta-hydroxypyruvate reductase; NADH:hydroxypyruvate reductase; D-glycerate dehydrogenase.

[0518] Hydroxypyruvate reductase is an enzyme found in higher plants, algae, mammalian tissues and bacteria. In most cases it has been postulated to convert hydroxypyruvate to glycerate. However, most enzymes also carry the reduction of glyoxylate to glycolate.

[0519] In the serine cycle methylotrophs, hydroxypyruvate reductase plays a key role in the assimilation of carbon. It catalyzes the conversion of hydroxypyruvate to glycerate, a key step of the serine cycle, but it also plays an important role in the metabolism of C2 compounds, by interconverting glyoxylate and glycolate.

[0520] In some embodiments, hydroxypyruvate reductase catalyzes the conversion of glycerate to hydroxypyruvate.

[0521] In some embodiments, the enzyme having hydroxypyruvate reductase activity is encoded by an amino acid sequence having at least 70% sequence identity, having at least 80% sequence identity, or having at least 90% sequence identity to E. coli ghrB. In some embodiments, the enzyme having hydroxypyruvate reductase activity is E. coli ghrB.

[0522] In some embodiments, the one or more nucleic acid molecules encoding the hydroxypyruvate reductase is ghrB, or homolog thereof. In some embodiments, the one or more nucleic acid molecules encoding an enzyme having hydroxypyruvate reductase activity comprise an amino acid sequence set forth in SEQ ID NO: 242. In a further embodiment, the one or more nucleic acid molecule encoding an enzyme having hydroxypyruvate reductase activity is encoded by a nucleic acid sequence selected from the group consisting of SEQ ID NO: 241.

### Glycerate Decarboxylase

[0523] The present disclosure describes enzymes that can catalyze the following reaction:

D-glycerate+H+→ethylene glycol+CO₂

[0524] In some embodiments, glycerate decarboxylase catalyzes the conversion of glycerate to ethylene glycol.

### 3-Phosphoglycerate Phosphatase (EC 3.1.3.38) or 2-Phosphoglycerate Phosphatase (EC 3.1.3.20)

[0525] The present disclosure describes enzymes that can catalyze the following reaction:

3-phospho-D-glycerate+H₂O→D-glycerate+phosphate

2-phospho-D-glycerate+H2O→D-glycerate+phosphate

[0526] 3-phosphoglycerate phosphatase may also be known as D-3-phosphoglycerate phosphatase; 3-PGA phosphatase. 2-phosphoglycerate phosphatase may also be known as D-2-phosphoglycerate phosphatase; 2-PGA phosphatase. These enzymes belong to the family of hydrolases, specifically those acting on phosphoric monoester bonds.

[0527] In some embodiments, the enzyme having 3-phosphoglycerate phosphatase activity or the enzyme having 2-phosphoglycerate phosphatase activity is encoded by an amino acid sequence having at least 70% sequence identity, having at least 80% sequence identity, or having at least 90% sequence identity to E. coli phoA. In some embodiments, the enzyme having 3-phosphoglycerate phosphatase activity or enzyme having 2-phosphoglycerate phosphatase activity is E. coli phoA.

[0528] In some embodiments, the one or more nucleic acid molecules encoding the enzyme having 3-phosphoglycerate phosphatase activity or enzyme having 2-phosphoglycerate phosphatase activity is phoA, or homolog thereof. In some embodiments, the one or more nucleic acid molecules encoding an enzyme having 3-phosphoglycerate phosphatase activity or enzyme having 2-phosphoglycerate phosphatase activity comprise an amino acid sequence set forth in SEQ ID NO: 246. In a further embodiment, the one or more nucleic acid molecule encoding an enzyme having 3-phosphoglycerate phosphatase activity or enzyme having 2-phosphoglycerate phosphatase activity is encoded by a nucleic acid sequence set forth in SEQ ID NO: 245.

### Glycerate Kinase (EC 2.7.1.31)

[0529] The present disclosure describes enzymes that can catalyze the following reaction:

D-glycerate+ATP↔3-phospho-D-glycerate+ADP+H+

D-glycerate+ATP↔2-phospho-D-glycerate+ADP+H+

[0530] Glycerate kinase may also be known as glycerate 3-kinase; glycerate kinase (phosphorylating) (ambiguous); D-glycerate 3-kinase; D-glycerate kinase (ambiguous); glycerate-kinase (ambiguous); GK (ambiguous); D-glyceric acid kinase (ambiguous); ATP:(R)-glycerate 3-phosphotransferase.

[0531] This enzyme belongs to the family of transferases, specifically those transferring phosphorus-containing groups (phosphotransferases) with an alcohol group as acceptor. This enzyme participates in 3 metabolic pathways: serine/glycine/threonine metabolism, glycerolipid metabolism, and glyoxylate-dicarboxylate metabolism.

[0532] In some embodiments, an enzyme having glycerate kinase activity catalyzes the conversion of 3-phosphoglycerate to glycerate. In other embodiments, an enzyme having glycerate kinase activity catalyzes the conversion of 2-phosphoglycerate to glycerate.

[0533] In some embodiments, the enzyme having glycerate kinase activity is a glycerate 3-kinase. In some embodiments, the enzyme having glycerate 3-kinase activity is encoded by an amino acid sequence having at least 70% sequence identity, having at least 80% sequence identity, or having at least 90% sequence identity to Arabidopsis thaliana GLYK. In some embodiments, the glycerate 3-kinase is Arabidopsis thaliana GLYK.

[0534] In some embodiments, the one or more nucleic acid molecules encoding the enzyme having glycerate 3-kinase activity is GLYK, or homolog thereof. In some embodiments, the one or more nucleic acid molecules encoding an enzyme having glycerate 3-kinase activity comprise an amino acid sequence set forth in SEQ ID NO: 248. In a further embodiment, the one or more nucleic acid molecule encoding an enzyme having glycerate 3-kinase activity is encoded by a nucleic acid sequence set forth in SEQ ID NO: 247.

[0535] In some embodiments, the enzyme having glycerate kinase activity is an enzyme having glycerate 2-kinase activity. In some embodiments, the enzyme having glycerate 2-kinase activity is encoded by an amino acid sequence having at least 70% sequence identity, having at least 80% sequence identity, or having at least 90% sequence identity to E. coli glxK. In some embodiments, the enzyme having glycerate 2-kinase activity is encoded by an amino acid sequence having at least 70% sequence identity, having at least 80% sequence identity, or having at least 90% sequence identity to E. coli garK. In other embodiments, the enzyme having glycerate 2-kinase activity is E. coli glxK. In some embodiments, the glycerate 2-kinase is E. coli garK.

[0536] In some embodiments, the one or more nucleic acid molecules encoding the enzyme having glycerate 2-kinase activity is glxK, or homolog thereof. In some embodiments, the one or more nucleic acid molecules encoding the enzyme having glycerate 2-kinase activity is garK, or homolog thereof. In some embodiments, the one or more nucleic acid molecules encoding an enzyme having glycerate 2-kinase activity comprise an amino acid sequence selected from SEQ ID NOs: 250 and 252. In a further embodiment, the one or more nucleic acid molecule encoding an enzyme having glycerate 2-kinase activity is encoded by a nucleic acid sequence selected from SEQ ID NOs: 249 and 251.

Transferase that Transfers One-Carbon Group (EC 2.1.2.-)

[0537] The present disclosure describes enzymes that can catalyze the following reaction:

M-THF+H2O↔THF+formaldehyde

[0538] Transferases such as the hydroxymethyl-, formyl- and related transferases may be used. Examples of hydroxymethyl-, formyl- and related transferases include glycine hydroxymethyltransferase, phosphoribosylglycinamide formyltransferase, phosphoribosylaminoimidazolecarboxamide formyltransferase, glycine formimidoyltransferase, glutamate formiminotransferase, D-alanine 2-hydroxymethyltransferase, deoxycytidylate 5-hydroxymethyltransferase, methionyl-tRNA formyltransferase, aminomethyltransferase, 3-methyl-2-oxobutanoate hydroxymethyltransferase and UDP-4-amino-4-deoxy-L-arabinose formyltransferase.

### Serine Hydroxymethyltransferase (EC 2.1.2.1)

[0539] The present disclosure describes enzymes that can catalyze the following reaction:

L-serine+tetrahydrofolate(THF)↔Glycine+5,10-methylenetetrahydrofolate(M-THF)

[0540] Serine hydroxymethyltransferase (GlyA) converts serine to glycine, transferring a methyl group to tetrahydrofolate, thus forming 5,10-methylene-tetrahydrofolate (M-THF). M-THF is the major source of C1 units in the cell, making GlyA a key enzyme in the biosynthesis of purines, thymidine, methionine, choline and lipids.

[0541] The enzyme also catalyzes several side reactions including hydrolysis of 5,10-methenylTHF to 5-formylTHF and the reversible cleavage of 3-hydroxy amino acids (L-threonine, allothreonine, 3-phenylserine) to glycine and an aldehyde. D-alanine inactivates the enzyme by reacting with the pyridoxal phosphate prosthetic group to form pyridoxamine phosphate.

[0542] The Thr226 residue within a conserved region of the enzyme appears to be involved in substrate discrimination. The His228 residue plays a role in determining reaction specificity. Lys229 does not appear to play a catalytic role. Arg363 appears to be the binding site for the carboxyl group of the amino acid substrate. The hydroxyl group of Tyr65 may be involved in the conversion of the active site from a closed to an open conformation. Both Tyr55 and Arg235 are required for the transaldimination reaction.

[0543] Studies on refolding of the enzyme indicate that pyridoxal 5′-phosphate (PLP) only binds to the dimeric apoenzyme at the end of the folding pathway. The mechanism of PLP addition has been investigated further. At high concentrations of PLP, a second molecule of PLP can bind at Lys346. A conserved hydrophobic contact area is involved in stability of the PLP binding site. Tyr55 is required for correct positioning of the PLP cofactor.

[0544] Crystal structures of wild type and mutant serine hydroxymethyltransferase have been solved.

[0545] glyA mutants cannot use glycine as the sole source of nitrogen. A glyA mutant is auxotrophic for glycine; glyA was later shown to be essential for growth on glycerol minimal medium.

[0546] Sequences 3′ to the structural gene within the glyA mRNA are required for mRNA stability.

[0547] In some embodiments, the enzyme having serine hydroxymethyltransferase activity is encoded by an amino acid sequence having at least 70% sequence identity, having at least 80% sequence identity, or having at least 90% sequence identity to E. coli glyA. In some embodiments, the one or more nucleic acid molecule encoding an enzyme having serine hydroxymethyltransferase comprises an amino acid sequence set forth in UniProt ID P0A825. In a further embodiment, the one or more nucleic acid molecule encoding an enzyme having serine hydroxymethyltransferase is encoded by a nucleic acid sequence set forth in Gene ID 947022.

### Formaldehyde Dehydrogenase (EC 1.2.1.46 and EC 1.2.1.-)

[0548] The present disclosure describes enzymes that can catalyze the following reaction:

Formaldehyde+NAD⁺+H2O→formate+NADH+2H⁺

[0549] Formaldehyde dehydrogenase may also be known as NAD-linked formaldehyde dehydrogenase, NAD-dependent formaldehyde dehydrogenase or formaldehyde:NAD⁺ oxidoreductase.

[0550] Most of the formaldehyde dehydrogenases found in animals, plants and bacteria belong to a group called class III alcohol dehydrogenase group and require the addition of glutathione for activity. As a matter of fact, the true substrate for these enzymes was shown to be not formaldehyde, but S-hydroxymethylglutathione, which is formed nonenzymatically from formaldehyde and glutathione.

[0551] Unlike those enzymes, the enzyme isolated from Pseudomonas putida catalyzes the irreversible oxidation of formaldehyde to formate without the addition of glutathione. Since its substrate is formaldehyde, in an essence this is the “genuine” formaldehyde dehydrogenase. Like other formaldehyde dehydrogenases, the P. putida FDH is a zinc-containing metalloenzyme. It also requires NAD⁺ as the electron acceptor. However, unlike the enzymes that belong to the class III alcohol dehydrogenase group, it is sensitive to 4-methylpyrazole. In one embodiment, the formaldehyde dehydrogenase is from Pseudomonas putida. In some embodiments, the formaldehyde dehydrogenase is encoded by an amino acid sequence having at least 70% sequence identity, having at least 80% sequence identity, or having at least 90% sequence identity to P. putida fdhA. In some embodiments, the one or more nucleic acid molecule encoding a formaldehyde dehydrogenase comprises an amino acid sequence set forth in GenBank Accession BAA04743.1. In a further embodiment, the one or more nucleic acid molecule encoding a formaldehyde dehydrogenase is encoded by a nucleic acid sequence set forth in GenBank Accession D21201.1.

[0552] In the industrially important actinomycete Corynebacterium glutamicum ATCC 13032, evidence suggests that two enzymes contribute to the degradation of toxic formaldehyde, mycothiol-dependent formaldehyde dehydrogenase encoded by gene fadH, and to a lesser extent acetaldehyde dehydrogenase encoded by gene aid (acetaldehyde dehydrogenase). A mutant lacking both of these enzymes was unable to grow in formaldehyde-containing medium. It also did not grow in vanillate-containing medium because the oxidation of vanillate produces intracellular formaldehyde. Detoxification of formaldehyde is necessary when this soil bacterium encounters formaldehyde in its habitat, or when formaldehyde is generated during metabolism of environmental compounds such as vanillate. The formate produced by FadH can be further oxidized to CO2 by the formate dehydrogenase encoded by gene fdhF.

[0553] An aid mutant showed a reduction in formaldehyde degradation of about 30% as compared with wild-type. Inactivation of the chromosomal aid gene resulted in loss of acetaldehyde dehydrogenase activity and loss of the ability of this organism to grow on or utilize ethanol, suggesting a two step oxidation of ethanol to acetate. Expression of gene aid is dependent on the transcriptional regulator RamA, whereas RamB has a slightly negative effect on expression. In one embodiment, the formaldehyde dehydrogenase is from Corynebacterium glutamicum ATCC 13032. In some embodiments, the formaldehyde dehydrogenase is encoded by an amino acid sequence having at least 70% sequence identity, having at least 80% sequence identity, or having at least 90% sequence identity to Corynebacterium glutamicum ATCC 13032 aid. In some embodiments, the one or more nucleic acid molecule encoding a formaldehyde dehydrogenase comprises an amino acid sequence set forth in UniProt ID Q8NLZ0. In a further embodiment, the one or more nucleic acid molecule encoding a formaldehyde dehydrogenase is encoded by a nucleic acid sequence set forth in Gene ID 1020739.

[0554] In some embodiments, the formaldehyde dehydrogenase is encoded by an amino acid sequence having at least 70% sequence identity, having at least 80% sequence identity, or having at least 90% sequence identity to Pseudomonas oleovorans alkH.

[0555] In Saccharomyces cerevisiae, two tandem-repeated genes ALD2 and ALD3 encode two cytoplasmic stress-inducible isoforms of aldehyde dehydrogenase. The expression of these isoforms is dependent on the general-stress transcription factors Msn2 and Msn4 but is independent of the HOG MAP kinase pathway. Both forms can use the cofactor NAD+ much more efficiently that NADP+, and are not activated by any cations. While ALD3 is induced by a variety of stresses, including osmotic shock, heat shock, glucose exhaustion, oxidative stress and drugs, ALD2 is only induced by osmotic stress and glucose exhaustion.

[0556] In some embodiments, the formaldehyde dehydrogenase is encoded by an amino acid sequence having at least 70% sequence identity, having at least 80% sequence identity, or having at least 90% sequence identity to Saccharomyces cerevisiae ALD2. In other embodiments, the formaldehyde dehydrogenase is encoded by an amino acid sequence having at least 70% sequence identity, having at least 80% sequence identity, or having at least 90% sequence identity to Saccharomyces cerevisiae ALD3. In some embodiments, the one or more nucleic acid molecule encoding a formaldehyde dehydrogenase comprises an amino acid sequence selected from UniProt ID P47771 and UniProt ID P54114. In a further embodiment, the one or more nucleic acid molecule encoding a formaldehyde dehydrogenase is encoded by a nucleic acid sequence selected from Gene ID 855206 and Gene ID 855205.

[0557] In some embodiments, the enzyme having formaldehyde dehydrogenase activity is encoded by an amino acid sequence having at least 70% sequence identity, having at least 80% sequence identity, or having at least 90% sequence identity to Homo sapiens ALDH3A2. In other embodiments, the enzyme having formaldehyde dehydrogenase activity is encoded by an amino acid sequence having at least 70% sequence identity, having at least 80% sequence identity, or having at least 90% sequence identity to Homo sapiens ALDH9A1. In some embodiments, the one or more nucleic acid molecule encoding an enzyme having formaldehyde dehydrogenase activity comprises an amino acid sequence selected from UniProt ID P51648 and UniProt ID P49189. In a further embodiment, the one or more nucleic acid molecule encoding an enzyme having formaldehyde dehydrogenase activity is encoded by a nucleic acid sequence selected from Gene ID 224 and Gene ID 223.

### Formate Dehydrogenase (EC 1.2.1.-)

[0558] The present disclosure describes enzymes that can catalyze the following reactions:

formate+an oxidized electron acceptor+H+→CO₂+a reduced electron acceptor

formate+H+→CO₂+H₂(catalyzed by complex)

formate+an oxidized hydrogenase 3→CO₂+a reduced hydrogenase 3

[0559] Formate dehydrogenase-H is one of three membrane-associated formate dehydrogenase isoenzymes in E. coli. All are functional in the anaerobic metabolism of the organism.

[0560] Formate dehydrogenase-H (FDH-H) is located in the cytoplasm and together with hydrogenase-3, FDH-H forms the formate-hydrogen lyase complex. The enzyme is oxygen sensitive and contains selenium as selenocysteine incorporated cotranslationally at the position of an in-frame UGA stop codon in the FdhF open reading frame. A crystal structure of FDH-H has been solved at 2.3 Å resolution, confirming the presence of a [4Fe-4S] cluster, coordination of the Mo cofactor by selenocysteine, and the position of the binding site for the inhibitor nitrate. Expression of fdhF is induced by formate and the absence of external electron acceptors, and is repressed by nitrate, nitrite, trimethylamine N-oxide, and oxygen. Formate can overcome repression by nitrate but not by oxygen. Inhibition of DNA gyrase enhances expression of fdhF.

[0561] fdnGHI encodes membrane bound formate dehydrogenase N (FDH-N)—a respiratory enzyme that catalyses the oxidation of formate to carbon dioxide, donating electrons to the quinone pool for the reduction of anaerobic respiratory substrates such as nitrate and trimethylamine N-oxide. FDH-N is a member of the complex iron sulfur molybdoenzyme (CISM) family. The oxidation of formate by FDH-N is electrogenic (H+/e−=1); oxidation of formate in the periplasm is accompanied by menaquinone reduction at the cytoplasmic face of the inner membrane. Expression of formate dehydrogenase-N is induced by nitrate and anaerobiosis, mediated by NarL and Fnr, respectively. Purified FDH-N contains three subunits, designated α (FdnG), β (FdnH) and γ (FdnI). A crystal structure, resolved at 1.6 Å, indicates that this subcomplex is further organised into physiologically relevant trimers with the α and β subunits located towards the periplasmic face of the inner membrane and the γ subunits located towards the cytoplasm. Electrons are transferred from the site of formate oxidation in the α subunit across the membrane to the site of menaquinone reduction in the γ subunit. Protons are taken up from the cytoplasm at the menaquinone reduction site.

[0562] fdoGHI encodes formate dehydrogenase O (FDH-O)—a respiratory molybdoenzyme that catalyses the oxidation of formate to carbon dioxide, donating electrons to the membrane soluble quinone pool for the reduction of nitrate. FDH-O and nitrate reductase Z participate in a formate to nitrate electron transport pathway that is active when cells are shifted from aerobic to anaerobic conditions. The pathway operates with either menaquinone or ubiquinone. FDH-O appears to be expressed constitutively; unlike formate dehydrogenase N (FDH-N), it is not regulated by Fnr or NarL. Expression of FDH-O is increased under aerobic conditions; under anaerobic conditions, nitrate stimulates expression slightly; the global regulators H-NS and CRP may play a role in regulation of FDH-O expression. FDH-O may contribute to the cells ability to rapidly adapt to anaerobiosis while levels of FDH-N are still insufficient. FDH-O is a heterotrimeric complex consisting of an α (FdoG), a β (FdoH) and a γ (FdoI) subunit—it shares extensive sequence similarity and immunological properties with the anaerobically expressed FDH-N.

[0563] Candida boidinii formate dehydrogenase FDH1 is an NAD-dependent enzyme that mediates the detoxification of formate and is strongly inhibited by Cu²⁺, Hg, p-chloromercuribenzoate, cyanide, azide, thiocyanate and cyanate. The inhibition of cyanide is reversible and competes with formate. Protein expression is induced by methanol and repressed by glucose. Since the enzymatic reaction catalyzed by this formate dehydrogenase can regenerate NADH, it has been cloned into E. coli to optimize NADH requiring engineered pathways.

[0564] In the industrially important actinomycete Corynebacterium glutamicum ATCC 13032 evidence suggests that a formate dehydrogenase catalyzes the oxidation of formate to CO₂. Both formate and toxic formaldehyde are present in the environment and can be dissimilated by this soil bacterium via the oxidation of formaldehyde to formate. This can be accomplished via FadH and Aid. Formate is then converted to CO₂ by FdhF. FdhF is a molybdenum cofactor-dependent formate dehydrogenase that is active under oxic conditions, and was speculated to be involved in the stress response. The exact electron acceptor used by FdhF has not been defined. Gene fdhF is part of a gene cluster containing related genes fdhD and cg0617 that were shown by mutant analysis to be required for formate dehydrogenase activity. The growth of Corynebacterium glutamicum ATCC 13032 is inhibited to some extent in the presence of formate and strains lacking formate dehydrogenase activity show increased inhibition. Radiotracer experiments showed that when Corynebacterium glutamicum ATCC 13032 was grown with glucose and ¹³C-formate, it was metabolized to ¹³C-carbon dioxide. An fdhF deletion mutant could not metabolize formate. Growth studies also demonstrated the requirement for Mo²⁺. Protein sequence analysis suggested that FdhF is not an integral membrane protein, but is likely either cytosolic or membrane-associated. Putative orthologs have been identified in a variety of other soil bacteria.

[0565] When Cupriavidus oxalaticus is grown on formate as the main carbon and energy source, NAD+-dependent formate dehydrogenase is the key enzyme that generates NADH and CO₂. The latter enters the ribulose diphosphate carboxylase reaction. The enzyme has been purified to homogeneity from cells grown with formate. The enzyme is a complex flavoprotein containing 2 FMN (flavin mononucleotide), 18-25 non-heme iron atoms and 15-20 acid-labile sulfides. The specific activity was 42 units/mg. The enzyme is specific toward its natural substrate formate, but can accept multiple nonphysiological electron acceptors, including methylviologen, phenazine methosulfate, methylene blue, nitro blue tetrazolium salt, FMN, FAD, riboflavin, and oxygen. It has been shown that the enzyme can also catalyze the reaction in the opposite direction. However, under the conditions employed the enzyme catalyzed the oxidation of formate about 30 times faster than CO₂ reduction.

[0566] NAD+-dependent formate dehydrogenase from Gottschalkia acidurici catalyzes a reversible reaction. While it catalyzes the oxidation of formate to CO₂, it also catalyzes the reduction of the latter to formate, which is then converted to acetate. The enzyme has been partially purified and found to be a large enzyme complex (molecular weight of at least 200 kDa) that is very sensitive to oxygen and light. The enzyme contains a L-selenocysteine. Crude preparations of the enzyme could be coupled to NAD reduction during formate oxidation through ferredoxin. When the artificial electron acceptor methyl viologen was used instead of NAD, ferredoxin was not required. Cyanide inhibited the enzyme 90%. Basal formate oxidation activity in cell extracts was 0.85 μmol/min/mg protein, but increased 12-fold upon the addition of tungstate and selenite. Interestingly, the enzyme from the related organism Clostridium cylindrosporum, while having a similar requirement for selenite, requires molybdate rather than tungstate, which has an antagonistic effect on it.

[0567] The tungsten-containing NAD+-dependent formate dehydrogenase from Methylobacterium extorquens is a heterodimer containing iron-sulfur clusters, FMN and tungsten. It is somewhat unusual to find a tungsten-containing enzyme in aerobic bacteria, although several other examples have been found. The smaller 3 subunit appears to be a fusion protein, with its N-terminal domain related to NueE-like subunits, and its C-terminal domain related to NuoF-like subunits of known NADH-ubiquinone oxidoreductases.

[0568] Two different forms of formate dehydrogenase FDH have been purified from Methylosinus trichosporium OB3b independently by two groups, and the two proteins were found to have different properties. This protein is composed of two types of subunits in an apparent α₂β₂ arrangement, with a total size of 315 kDa. It contains nonheme iron and sulfide, and no other metals, and appeared to require FMN.

[0569] The Moraxella sp. NAD+-dependent formate dehydrogenase fdh is a relatively simple dimeric protein, with no prosthetic groups.

[0570] In some embodiments, the enzyme having formate dehydrogenase activity is encoded by an amino acid sequence having at least 70% sequence identity, having at least 80% sequence identity, or having at least 90% sequence identity to a formate dehydrogenase selected from the group consisting of E. coli fdhF (chlF, FDH-H), E. coli FDH-N, E. coli FDH-O, Candida boidinii FDH1, Corynebacterium glutamicum fdhF, Cupriavidus oxalaticus NAD+-dependent formate dehydrogenase, Gottschalkia acidurici NAD+-dependent formate dehydrogenase, Methylobacterium extorquens Fdh1, Methylosinus trichosporium formate dehydrogenase, and Moraxella sp. NAD+-dependent formate dehydrogenase fdh. In some embodiments, the one or more nucleic acid molecule encoding a formate dehydrogenase or formate dehydrogenase subunit comprises an amino acid sequence selected from UniProt ID P07658, UniProt ID P0AEK7, UniProt ID P0AAJ3, UniProt ID P24183, UniProt ID P32176, UniProt ID P0AAJ5, UniProt ID P0AEL0, UniProt ID O13437, UniProt ID Q8NSY6, UniProt ID Q8KTI7, UniProt ID Q8KTI8, and UniProt ID 008375. In a further embodiment, the one or more nucleic acid molecule encoding a formate dehydrogenase or formate dehydrogenase subunit is encoded by a nucleic acid sequence selected from Gene ID 948584, Gene ID 946038, Gene ID 948794, Gene ID 946035, Gene ID 948394, Gene ID 948395, Gene ID 948383, GenBank accession AJ011046.2, Gene ID 1021531, GenBank accession AF489516, and GenBank accession Y13245.1.

### Glycine Cleavage System

[0571] The glycine cleavage system is composed of four proteins: three enzymes and a carrier protein. In animals, the system is loosely bound to the mitochondrial inner membrane. The enzymes are i) P-protein (a pyridoxal phosphate-containing protein) or glycine dehydrogenase (decarboxylating) (EC1.4.4.2), ii) T-protein or aminomethyl-transferase (EC2.1.2.10), and iii) L-protein or dihydrolipoamide dehydrogenase (EC1.8.1.4). The carrier protein is called H-protein (a lipoic acid-containing protein).

[0572] The glycine cleavage reaction catalyzes the following reversible reaction:

Glycine+THF+NAD⁺↔M-THF+CO₂+NH₃+NADH+H⁺

[0573] The system is partitioned into three partial reactions. The reaction is completely reversible, and in both glycine cleavage and glycine synthesis an aminomethyl moiety bound to the lipoic acid of H-protein represents an intermediate that is subsequently degraded to, or can be formed from, methylene-tetrahydrofolate (M-THF) and ammonia by the action of T-protein. Possibly the reaction may involve a ternary complex of P-protein, aminomethyl moiety of glycine and H-protein, as a crucial intermediary state.

[0574] Reaction Catalyzed by P-Protein

[0575] The first partial reaction of the glycine degradation is the decarboxylation catalyzed by P-protein (a glycine decarboxylase). H-protein serves as a cosubstrate. One of the most characteristic properties of the glycine cleavage reaction is that, although P-protein should belong to a class of pyridoxal phosphate-dependent amino acid decarboxylases, P-protein requires H-protein to catalyze the decarboxylation of glycine significantly. The reaction proceeds via a sequential random mechanism where the carboxyl carbon of glycine is converted to carbon dioxide. The remnant of the glycine molecule is transferred to one of the sulfhydryl groups formed by the reductive cleavage of disulfide in lipoate attached to H-protein.

[0576] P-protein, a pyridoxal phosphate-containing protein of about 200 kDa, is either a homodimer or a dimer of heterodimers. The former has one molecule of pyridoxal phosphate per subunit, and the latter has one molecule of the cofactor per dimer on the β subunit. The pyridoxal cofactor is attached to a specific lysine residue. The pyridoxal cofactor interacts with the active-site pocket noncovalently. The active site of T. thermophilus P-protein is connected to the molecular surface by a channel with a broad entrance facing the solvent. The molecular surface around the channel is composed of several positively-charged amino acid residues, which are possibly involved in the complex formation with H-protein.

[0577] In some embodiments, the enzyme having glycine decarboxylase activity is encoded by an amino acid sequence having at least 70% sequence identity, having at least 80% sequence identity, or having at least 90% sequence identity to E. coli gcvP. In some embodiments, the one or more nucleic acid molecule encoding an enzyme having glycine decarboxylase activity comprises an amino acid sequence set forth in UniProt ID P33195. In a further embodiment, the one or more nucleic acid molecule encoding an enzyme having glycine decarboxylase activity is encoded by a nucleic acid sequence set forth in Gene ID 947394.

[0578] Reaction Catalyzed by T-Protein

[0579] The decarboxylated moiety of glycine attached to H-protein is subjected to further degradation catalyzed by T-protein (an aminomethyltransferase). The reaction requires THF and yields ammonia, M-THF, and H-protein with reduced lipoate. In the absence of THF, formaldehyde is produced instead of M-THF, but the reaction rate is less than 0.05% of that measured in the presence of THF. In the reverse reaction, T-protein catalyzes the formation of the H-protein-bound aminomethyl lipoate intermediate from M-THF, ammonia, and H-protein with reduced lipoate via an ordered Ter Bi mechanism, in which H-protein is the first substrate to bind followed by M-THF and ammonia. The order of the product release is THF and the methylamine-loaded H-protein.

[0580] T-protein is a monomer of about 40 kDa and forms a 1:1 complex with H-protein. A cross-linking study employing E. coli proteins revealed that the interaction of H-protein with T-protein causes a conformational change of T-protein. Intermolecular contact between Lys-288 of T-protein and Asp-43 of H-protein was found. The N-terminal region of T-protein is essential for the interaction with H-protein and for holding T-protein in a compact form. The crystal structure of human T-protein has been analyzed in a free form and that bound to N5-methyl-tetrahydrofolate, an analogue of M-THF. The overall structure consists of three cloverleaf-like structure with the central cavity where the THF cofactor is bound with the pteridin ring deeply buried into the hydrophobic pocket and the glutamyl group pointed to the C-terminal side surface. The structure resembles those of bacterial T-protein from Termotoga naritima, E. coli, and Pyrococcus horikoshii OT3. Structural and mutational analyses of human T-protein indicated that the invariant Asp-101 might play a key role in the initiation of the catalysis by increasing the nucleophilic character of the N10 atom of the folate substrate.

[0581] Residues involved in binding of folate have been identified by crosslinking and site-directed mutagenesis. The N-terminal region of GvcT is important for the proper conformation of GvcT, allowing interaction with the H-protein.

[0582] In some embodiments, the enzyme having aminomethyltransferase activity is encoded by an amino acid sequence having at least 70% sequence identity, having at least 80% sequence identity, or having at least 90% sequence identity to E. coli gcvT. In some embodiments, the one or more nucleic acid molecule encoding an enzyme having aminomethyltransferase activity comprises an amino acid sequence set forth in UniProt ID P27248. In a further embodiment, the one or more nucleic acid molecule encoding an enzyme having aminomethyltransferase activity is encoded by a nucleic acid sequence set forth in Gene ID 947390.

[0583] Reaction Catalyzed by L-Protein

[0584] The last step of the glycine cleavage reaction is the reoxidation of the reduced lipoate attached to H-protein catalyzed by L-protein. L-protein is well known as dihydrolipoamide dehydrogenase, lipoamide dehydrogenase, dihydrolipoyl dehydrogenase, or E3 protein component of 2-oxoacid (pyruvate, 2-oxoglutarate, and branched-chain 2-oxoacid) dehydrogenase multienzyme complexes. It catalyzes the transfer of electrons to the ultimate acceptor, NAD.

[0585] Experiments employing pea L-protein and H-protein showed that the oxidation of dihydrolipoyl H-protein was not affected by the presence of structurally related analogues such as apoH-protein or octanoylated H-protein. The structural interaction between L-protein and H-protein may not be essential for the oxidation reaction.

[0586] Kinetics of the reaction have been studied and suggest a modified ping-pong mechanism. Site-directed mutagenesis was used to identify and characterize the redox-active disulfide and a charged residue influencing the redox potential of the FAD cofactor. The insertion of the FAD cofactor is essential for dimerization and full activity.

[0587] An Ipd null mutant produces more pyruvate and L-glutamate under aerobic conditions. Metabolic flux analysis shows that the Entner-Doudoroff pathway I and the glyoxylate shunt are activated. Another dihydrolipoate dehydrogenase activity has been detected in E. coli Ipd mutants; thus, an isozyme may exist.

[0588] A mutation in the Ipd gene in E. coli causes the pyruvate dehydrogenase complex to be less sensitive to NADH inhibition and active during anaerobic growth. Amino acid substitutions at Glu354 that lowered the sensitivity of the enzyme to NADH inhibition were proposed to act by restricting the movement of NADH.

[0589] Suppressor mutations in Ipd have been shown to restore growth to a redox-defective mutant that lacks both the thioredoxin and glutathione/glutaredoxin reduction pathways. The suppressor mutations reduced Lpd activity resulting in dihydrolipoamide accumulation, which could then serve as an electron donor via reduction of glutaredoxins. The reoxidation of Lpd restored TCA cycle function.

[0590] Ipd shows differential codon adaptation, resulting in differential translation efficiency signatures, in aerotolerant compared to obligate anaerobic microbes. It was therefore predicted to play a role in the oxidative stress response. An Ipd deletion mutant was shown to be more sensitive than wild-type specifically to hydrogen peroxide exposure, but not other stresses.

[0591] In some embodiments, the enzyme having dihydrolipoamide dehydrogenase activity is encoded by an amino acid sequence having at least 70% sequence identity, having at least 80% sequence identity, or having at least 90% sequence identity to E. coli Ipd (IpdA, E3 subunit). In some embodiments, the one or more nucleic acid molecule encoding an enzyme having dihydrolipoamide dehydrogenase activity comprises an amino acid sequence set forth in UniProt ID P0A9P0. In a further embodiment, the one or more nucleic acid molecule encoding an enzyme having dihydrolipoamide dehydrogenase activity is encoded by a nucleic acid sequence set forth in Gene ID 944854.

[0592] H-Protein

[0593] H-protein is a monomeric and heat-stable protein of about 14 kDa. Vertebrate H-protein is composed of 125 amino acid residues, and lipoic acid is covalently linked to Lys-59. The X-ray crystal structure of the lipoylated pea leaf H-protein (131 residues) revealed that the lipoyl-lysine was localized on the surface of the protein. As mentioned above, the lipoyllysine arm on H-protein shuttles the reaction intermediate and reducing equivalents between the active sites of the components of the glycine cleavage system. The mechanism is analogous to that found in 2-oxoacid dehydrogenase complexes.

[0594] Lipoylation of H-protein as well as acyltransferase (E2) components of 2-oxoacid dehydrogenase complexes is catalyzed by lipoate-protein ligase A (LplA) in E. coli. The enzyme catalyzes both the formation of lipoyl-AMP from lipoate and ATP and the transfer of the lipoyl-moiety of lipoyl-AMP to H-protein and E2 components. The X-ray crystallographic study showed that LplA consists of a large N-terminal domain and a small C-terminal domain with a substrate-binding pocket at the interface between the two domains.

[0595] In mammals, lipoylation is an intramitocondrial event. Lipoic acid is first activated to lipoyl-GMP by lipoate activating enzyme, employing GTP as a high-energy compound. Lipoate activating enzyme is the same protein already known as xenobiotic-metabolizing medium-chain fatty acid: CoA ligase-Illl. Lipoate is then transferred from lipoyl-GMP to apoproteins by the action of lipoyltransferase.

[0596] The H-protein, coded for by the gcvH gene in E. coli, is a lipoylprotein that is reduced as it shuttles the methylamine group of glycine from the P-protein to the T-protein and is reoxidized by the dihydrolipoamide dehydrogenase. GcvH functions as a substrate for the three enzymes of the gcv complex.

[0597] Residues 61-65 are predicted to contain the lipoyl modification (on lysine), based on conservation of these residues and their correspondence to the lipoate attachment site of the Pisum sativum protein.

[0598] The interaction between GcvH and GcvT has been examined. Interaction between the two proteins may be necessary to form the folate binding site, in which the folate polyglutamyl region binds, exposing the pteridine ring. The GcvT N terminus is important for interaction with GcvH, probably by mediating a conformational change, and residue D43 of GcvH is proximal to GcvT in the GcvH-GcvT complex.

[0599] In some embodiments, the H-protein is encoded by an amino acid sequence having at least 70% sequence identity, having at least 80% sequence identity, or having at least 90% sequence identity to E. coli gcvH. In some embodiments, the one or more nucleic acid molecule encoding an H-protein comprises an amino acid sequence set forth in UniProt ID P0A6T9. In a further embodiment, the one or more nucleic acid molecule encoding an H-protein is encoded by a nucleic acid sequence set forth in Gene ID 947393.

### Glycolate Dehydrogenase or Glycolate Oxidase (EC 1.1.99.14)

[0600] The present disclosure describes enzymes that can catalyze the following reaction:

glycolate+an oxidized electron acceptor→glyoxylate+a reduced electron acceptor

[0601] Glycolate dehydrogenase may also be known as glycolate oxidase, glycolate oxidoreductase and glycolate:(acceptor) 2-oxidoreductase.

[0602] Glycolate oxidase catalyzes the first step in the utilization of glycolate as the sole source of carbon. The enzyme may be membrane-associated. A cytoplasmic membrane-associated glycolate oxidoreductase activity from E. coli ATCC11775 (serovar O1:K1:H7) has been isolated, and the GIcF subunit itself could only be detected in the membrane fraction. The physiological electron acceptor is unknown. Crude extracts from an E. coli strain expressing glcDEF from a multicopy plasmid contain glycolate oxidase activity. Insertion mutants in either glcD, glcE, or glcF abolish this activity, suggesting that all three gene products are subunits of a glycolate oxidase complex. Expression of the glcDEFGB operon is induced by growth on glycolate.

[0603] A putative glycolate oxidase in Arabidopsis thaliana is a mitochondrial homodimeric protein that binds one FAD per monomer and is expressed in leaves, stems, flowers and roots. Enzyme activity is inhibited by cyanide ions. It catalyzes the oxidation of D-lactate to pyruvate stereospecifically, mediating the detoxification of methylglyoxal and D-lactate.

[0604] In some embodiments, the enzyme having glycolate dehydrogenase activity is encoded by an amino acid sequence having at least 70% sequence identity, having at least 80% sequence identity, or having at least 90% sequence identity to an enzyme having glycolate dehydrogenase activity selected from E. coli glycolate dehydrogenase GLC and Arabidopsis thaliana glycolate dehydrogenase. In some embodiments, the one or more nucleic acid molecule encoding a glycolate dehydrogenase or glycolate dehydrogenase subunit comprises an amino acid sequence selected from UniProt ID P0AEP9, UniProt ID P52073, UniProt ID P52074, and UniProt ID Q94AX4. In a further embodiment, the one or more nucleic acid molecule encoding a glycolate dehydrogenase or glycolate dehydrogenase subunit is encoded by a nucleic acid sequence selected from Gene ID 947353, Gene ID 2847718, Gene ID 2847717, and GenBank accession Y13245.1.

### Alanine-Glyoxylate Aminotransferase (EC 2.6.1.44)

[0605] The present disclosure describes enzymes that can catalyze the following reaction:

glyoxylate+L-alanine↔glycine+pyruvate

[0606] In Saccharomyces cerevisiae alanine-glyoxylate aminotransferase subunit is one of three different enzymes used for glycine synthesis. The AGX1 gene, encoding this enzyme, was identified by comparing enzyme specific activities in knockout strains. When placed in a background deficient for the other enzymes responsible for glycine synthesis, the mutation in AGX1 produced complete glycine auxotrophy. The enzymes was subsequently purified and characterized. The enzyme, which contains pyridoxal 5′-phosphate as cofactor, is a homodimer of about 80 kDa, and is highly specific for L-alanine and glyoxylate.

[0607] The mitochondrially localized Homo sapiens alanine-glyoxylate aminotransferase 2 (AGXT2) and peroxisomal serine-pyruvate aminotransferase (AGXT1, see above) both catalyze the conversion of glyoxylate to glycine using alanine as the amino donor. However, AGXT2, but not AGXT1, can also utilize asymmetric dimethylarginine (ADMA) as an amino donor, leading to the formation of α-keto-δ-(NN-dimethylguanidino) valeric acid (DMGV). ADMA is a potent endogenous inhibitor of nitric-oxide (NO) synthase. ADMA levels are also controlled by cytosolic dimethylarginine dimethylaminohydrolases (DDAHs) that hydrolyze ADMA to citrulline and dimethylamine. Elevated levels of ADMA are associated with diabetes, hypertension, congestive heart failure, and atherosclerosis. AGXT2 is a pyridoxal phosphate dependent enzyme that is expressed primarily in the kidney, and its activity is one mechanism by which the kidney regulates blood pressure.

[0608] In Arabidopsis thaliana, alanine transaminases with four aminotransferase activities have been identified. AOAT1 (GGAT1) is peroxisomal located. Knock-out plants have reduced activity of AOAT, GPAT (glutamate:pyruvate aminotransferase), AGAT (alanine:glyoxylate aminotransferase) and GGAT (glutamate:glyoxylate aminotransferase). The GGAT and AGAT activities were reduced most drastically. These indicate AOAT1 is primarily involved in photorespiration. Similary, AOAT2 (GGAT2), which is predicted to be located in the peroxisome, is likely involved in photorespiration. In vitro assay of the recombinant proteins indicated that GGAT1 and GGAT2 have four aminotransferase activities, namely GGAT, AGAT, GPAT and AOAT. The two recombinant proteins exhibited very similar Km values towards amino acid substrates glutamate and alanine, as well as the oxoacid substrates glyoxylate, pyruvate and 2-oxoglutarate.

[0609] In some embodiments, the enzyme having alanine-glyoxylate aminotransferase activity is encoded by an amino acid sequence having at least 70% sequence identity, having at least 80% sequence identity, or having at least 90% sequence identity to an enzyme having alanine-glyoxylate aminotransferase activity selected from Saccharomyces cerevisiae AGX1, Homo sapiens AGXT2, Arabidopsis thaliana AOAT1 and Arabidopsis thaliana AOAT2. In some embodiments, the one or more nucleic acid molecule encoding an enzyme having alanine-glyoxylate aminotransferase activity comprises an amino acid sequence selected from UniProt ID P43567, UniProt ID Q9BYV1, UniProt ID Q9LR30 and UniProt ID Q9S7E9. In a further embodiment, the one or more nucleic acid molecule encoding an enzyme having alanine-glyoxylate aminotransferase activity is encoded by a nucleic acid sequence selected from Gene ID 850514, Gene ID 64902, TAIR accession AT1G23310 and TAIR accession AT1G70580.

### Alanine Transaminase (EC 2.6.1.2)

[0610] The present disclosure describes enzymes that can catalyze the following reaction:

2-oxoglutarate+L-alanine↔L-glutamate+pyruvate

[0611] In some embodiments, the alanine transaminase is a glutamate-pyruvate aminotransferase. AlaA is one of three major alanine-synthesizing transaminases in E. coli. AlaA and AlaC together account for 90% of glutamic-pyruvic transaminase (GPT) activity in the cell. A crystal structure of AlaA has been solved at 2.11 Å resolution. The structure shows a symmetric α2 homodimer typical of fold type I aminotransferases. An alaA deletion strain has no growth defect, but an alaA avtA double mutant forms small colonies on agar plates. An alaA avtA alaC triple mutant has a slow growth phenotype in liquid medium. The defects of the double and triple mutants can be rescued by addition of alanine. Fitness and competitive growth experiments were performed under different growth conditions. Particularly under oxygen-limiting conditions, the doubling time of the ΔalaA strain in minimal media is increased compared to growth in rich media. Under competitive growth conditions, the ΔalaA mutation confers a disadvantage compared to wild type even in rich media. alaA was identified in a screen for genes that reduce the lethal effects of stress. An alaA insertion mutant is more sensitive than wild type to mitomycin C and other stresses and less sensitive to 10% SDS. The alaA gene was first identified as a mutant with a leaky requirement for alanine or valine.

[0612] AlaB is one of three major alanine-synthesizing transaminases in E. coli. AlaB catalyzes a glutamate-pyruvate aminotransferase reaction, generating alanine from pyruvate with glutamate as the amino donor. This activity has been assayed in crude cell extracts, and the gene encoding AlaB had been isolated on a plasmid. Expression of alaB from a multicopy plasmid partially suppresses the growth defect of an ilvE alaA mutant strain.

[0613] AlaC is one of three major alanine-synthesizing transaminases in E. coli. A homology model of the enzyme based on the crystal structure of AlaA has been generated. An alaC deletion strain has no growth defect, but an alaA avtA alaC triple mutant has a slow growth phenotype in liquid medium. The defect can be rescued by addition of alanine. Fitness and competitive growth experiments were performed under different growth conditions. Particularly under oxygen-limiting conditions, the doubling time of the ΔalaC strain in minimal media is increased compared to growth in rich media; unlike for the alaA and avtA mutants, addition of L-alanine returns the doubling time to that observed in DMEM medium. Under competitive growth conditions, the ΔalaC mutation confers a disadvantage compared to wild type even in rich media. Expression of alaC is activated by the transcriptional regulator SgrR. AlaC may thus play a role in glucose-phosphate stress. However, an alaC deletion mutant does not show altered sensitivity to α-methylglucoside, which induces sugar-phosphate stress.

[0614] In Homo sapiens, alanine aminotransferase is a cytoplasmic enzyme that catalyzes the reversible transamination between L-alanine and 2-oxoglutarate to form pyruvate and L-glutamate. The interconversion of these four major metabolic intermediates gives this enzyme both degradative and biosynthetic roles. It participates in the alanine-glucose cycle of skeletal muscle and liver, gluconeogenesis, and glutamate generation in the brain. Alanine aminotransferase is expressed in kidney, skeletal muscle, adipose tissue and heart. There are two isoforms of the enzyme: alanine aminotransferase 1 (GPT) and alanine aminotransferase 2 (GPT2). Human alanine aminotransferase 1 (GPT) was purified from liver. Recombinant human alanine aminotransferase 2 (GPT2) from adipose tissue was expressed in Escherichia coli and the molecular mass was determined by SDS-PAGE. The enzyme is expressed at high levels in adipose tissue, muscle, brain and kidney and at lower levels in breast and liver.

[0615] The subunit structure of an alanine transaminase from the marine polychaete annelid Arenicola marina (lugworm) has not been reported. It has a native apparent molecular mass of 91 kDa as determined by gel filtration chromatography. The gene encoding it in this organism has not been identified. In marine annelids and mollusks this reaction participates in an anaerobic energy generation pathway that operates during periods of hypoxia or anoxia. Alanine transaminase (glutamate pyruvate transaminase) from this organism has been partially purified from body wall muscle and characterized. High alanine transaminase activity was found in this tissue. Specific, reversible, L-glutamate-dependent L-alanine transaminase and L-aspartate transaminase activities have also been demonstrated in tissues of the mussel Mytilus edulis.

[0616] The Arabidopsis thaliana tryptophan aminotransferase TAA1 protein is involved in the formation of indole-3-pyruvate, a precursor to indole-3-acetate (IAA), a biologically important auxin that acts as a phytohormone in many plant species. In vitro assays reveal that this pyridoxal 5′-phosphate (PLP)-dependent aminotransferase can act on a number of different L-amino acids, including L-phenylalanine, L-tyrosine, L-leucine, L-alanine, L-methionine, and L-glutamine using either pyruvate or 2-oxoglutarate as a cosubstrate. However, enzymatic assays, in silico docking experiments, and mutant phenotypic analyses all suggest that L-tryptophan is the in vivo substrate for this enzyme. TAA1 has a Km of 0.29 mM and a Vmax of 12.9 μM/min when tested with L-tryptophan and pyruvate. It is unclear whether pyruvate or 2-oxoglutarate is the more biologically relevant cosubstrate for this enzyme.

[0617] The gene encoding this protein was identified in screens for shade avoidance mutants and mutants with a weak ethylene insensitivity suggesting that the auxin synthesized through a TAA1-mediated pathway is particularly important for the responses to specific environmental and hormonal stimuli. In addition, normal developmental processes, such as embryogenesis, that require proper auxin levels, are disrupted when TAA1 and one or more of its closely related family members (i.e. TAR1 and TAR2) are knocked-out in Arabidopsis plants. This enzyme activity appears to be widely distributed in the plant kingdom, based on the ability of enzymatic extracts from 30 different species distributed among 16 families, to catalyze the formation of IPA in a transaminase reaction. Three species of algae also have this activity.

[0618] In Arabidopsis thaliana, alanine transaminases with four aminotransferase activities have been identified. AOAT1 (GGAT1) is peroxisomal located. Knock-out plants have reduced activity of AOAT, GPAT (glutamate:pyruvate aminotransferase), AGAT (alanine:glyoxylate aminotransferase) and GGAT (glutamate:glyoxylate aminotransferase). The GGAT and AGAT activities were reduced most drastically. These indicate AOAT1 is primarily involved in photorespiration. Similary, AOAT2 (GGAT2), which is predicted to be located in the peroxisome, is likely involved in photorespiration. In vitro assay of the recombinant proteins indicated that GGAT1 and GGAT2 have four aminotransferase activities, namely GGAT, AGAT, GPAT and AOAT. The two recombinant proteins exhibited very similar Km values towards amino acid substrates glutamate and alanine, as well as the oxoacid substrates glyoxylate, pyruvate and 2-oxoglutarate.

[0619] Alanine aminotransferase activities have also been described from Candida maltosa, Clostridium propionicum, Pyrococcus furiosus, Megathyrsus maximus and Panicum miliaceum. The Panicum miliaceum putative alanine aminotransferase was cloned from this NAD-ME type C4 plant and found to express in both mesophyll and bundle sheath cells, and the gene expression was light-inducible. The mRNA accumulation increased dramatically during greening in both cell types which is in agreement with its predicted role in C4 photosynthesis.

[0620] In some embodiments, the enzyme having alanine transaminase activity is encoded by an amino acid sequence having at least 70% sequence identity, having at least 80% sequence identity, or having at least 90% sequence identity to an enzyme having alanine transaminase activity selected from E. coli glutamate-pyruvate aminotransferase alaA, E. coli glutamate-pyruvate aminotransferase alaB, E. coli glutamate-pyruvate aminotransferase alaC, Homo sapiens alanine aminotransferase 1 (GPT), Homo sapiens alanine aminotransferase 2 (GPT2), Arenicola marina alanine transaminase, Arabidopsis thaliana tryptophan aminotransferase TAA1, Arabidopsis thaliana AOAT1, Arabidopsis thaliana AOAT2, Candida maltosa alanine aminotransferase, Clostridium propionicum alanine aminotransferase, Pyrococcus furiosus alanine aminotransferase aat, Megathyrsus maximus alanine transaminase, and Panicum miliaceum alanine transaminase AlaAT-2. In some embodiments, the one or more nucleic acid molecule encoding enzyme having alanine transaminase activity comprises an amino acid sequence selected from UniProt ID P0A959, UniProt ID P77434, UniProt ID P24298, UniProt ID Q8TD30, UniProt ID Q9S7N2, UniProt ID Q9LR30, UniProt ID Q9S7E9, UniProt ID Q9P9M8, and UniProt ID P34106. In a further embodiment, the one or more nucleic acid molecule encoding enzyme having alanine transaminase activity is encoded by a nucleic acid sequence selected from Gene ID 946772, Gene ID 946850, Gene ID 2875, Gene ID 84706, Gene ID 843393, TAIR accession AT1G23310, TAIR accession AT1G70580, GenBank accession AF163769.1 and GenBank accession X69421.1.

### Glutamate Dehydrogenase (EC 1.4.1.2 and EC 1.4.1.3)

[0621] The present disclosure describes enzymes that can catalyze the following reactions:

L-glutamate+NAD⁺+H₂O↔2-oxoglutarate+ammonium+NADH+H+

L-glutamate+NAD(P)++H2O↔2-oxoglutarate+ammonium+NAD(P)H+H+

[0622] In some embodiments, the glutamate dehydrogenase is an NAD-dependent glutamate dehydrogenase from Saccharomyces cerevisiae (GDH2) that degrades glutamate to ammonia and alpha-ketoglutarate. Expression of GDH2 is sensitive to nitrogen catabolite repression and intracellular ammonia levels.

[0623] There are two NAD-dependent glutamate dehydrogenase (GDH) genes in Arabidopsis, GDH1 and GDH2, encoding the alpha- and beta-subunits, respectively. Seven hexameric isoforms of GDH have been detected which are composed of different ratios of the alpha and beta subunits. Different isoforms are distributed in different tissues under different environmental and physiological conditions. The enzyme activity of GDH is controlled in part at the transcriptional level.

[0624] Glutamate dehydrogenase from Peptoniphilus asaccharolyticus catalyzes the NAD-dependent, oxidative deamination of L-glutamate to 2-oxoglutarate. The reaction is highly substrate specific. No activity was observed in the presence of D-glutamate, D- or L-asparate, glutamine or when NADP replaced NAD. Using sucrose gradient density centrifugation, researchers estimated that the molecular weight of the native enzyme was between 300-340 kDa, suggesting that the enzyme may be a homohexamer. Other researchers, on the other hand, estimated that the molecular weight of the native enzyme was approximately 226 kDa, using gel filtration. The K_{M}values for L-glutamate and NAD+ were 1.3 mM and 0.25 mM, respectively.

[0625] Halobacterium salinarum is one of the organisms reported to have more than one form of GDH, with different forms utilizing different cofactors (NAD and NADP). It was eventually shown that the organism has four genes encoding four different glutamate dehydrogenase enzymes. Two of these gene products have been purified and characterized biochemically. One of the genes, gdhA1, which was originally predicted to encode an NADP-specific form, was found to encode an NAD-specific enzyme.

[0626] Homo sapiens glutamate dehydrogenases (GDHs) are homohexameric mitochondrial matrix enzymes that catalyze the reversible oxidative deamination of L-glutamate to 2-oxoglutarate and ammonia. Mammalian GDHs are unusual enzymes, in that they are able to use either NAD or NADP as a co-factor. Humans express two GDH isoenzymes. Glutamate dehydrogenase 1 (GLUD1) is expressed at high levels in liver, brain, pancreas and kidney. Glutamate dehydrogenase 2 (GLUD2) is encoded by an X chromosome-linked intronless gene and is expressed in retina, testis, and brain. Mutations in GLUD1 that lead to enzyme overactivity, result in hyperinsulinemia. Allosteric control of mammalian GDH activity by positive effectors like ADP and L-leucine and negative effectors like GTP have been extensively studied.

[0627] Bacillus subtilis PCI 219 has a single glutamate dehydrogenase (GDH) with dual coenzyme specificity for NAD(H) and NADP(H). Its molecular weight was estimated to be 250,000+/−20,000 by gel filtration, and 270,000+/−30,000 by zone centrifugation in a sucrose density gradient. The subunit size was about 57,000, suggesting that it is a homotetramer.

[0628] A cDNA clone was isolated from Solanum lycopersicum tissues. The cDNA encoded a protein that shares identity with glutamate dehydrogenase (GDH) of plants. Expression analysis of this protein showed that it is expressed in stems, roots and leaves but is absent in fruit tissues. The study also showed that the two subunits of tomato GDH1 were encoded by a single gene. This enzyme converts 2-oxoglutarate to L-glutamate.

[0629] Glutamate dehydrogenase activities have also been described from Clostridium propionicum and Thermotoga maritima.

[0630] In some embodiments, the enzyme having glutamate dehydrogenase activity is encoded by an amino acid sequence having at least 70% sequence identity, having at least 80% sequence identity, or having at least 90% sequence identity to a glutamate dehydrogenase selected from Saccharomyces cerevisiae NAD-dependent glutamate dehydrogenase GDH2, Arabidopsis thaliana NAD-dependent glutamate dehydrogenase GDH2, Arabidopsis thaliana NAD-dependent glutamate dehydrogenase GDH1, Peptoniphilus asaccharolyticus NAD-dependent glutamate dehydrogenase gdhA, Halobacterium salinarum NAD-dependent glutamate dehydrogenase gdhA, Thermotoga maritima glutamate dehydrogenase, Homo sapiens glutamate dehydrogenase 1 (GLUD1), Homo sapiens glutamate dehydrogenase 2 (GLUD2), Bacillus subtilis glutamate dehydrogenase and Solanum lycopersicum glutamate dehydrogenase GDH1. In some embodiments, the one or more nucleic acid molecule encoding an enzyme having glutamate dehydrogenase activity comprises an amino acid sequence selected from UniProt ID P33327, UniProt ID Q38946, UniProt ID Q38946, UniProt ID P28997, UniProt ID P29051, UniProt ID P00367, UniProt ID P49448 and UniProt ID P93541. In a further embodiment, the one or more nucleic acid molecule encoding an enzyme having glutamate dehydrogenase activity is encoded by a nucleic acid sequence selected from Gene ID 461927, TAIR accession AT5G07440, TAIR accession AT5G18170, GenBank accession M76403.1, GenBank accession X63837.1, Gene ID 2746, Gene ID 2747 and GenBank accession U48695.1.

### Acetaldehyde Dehydrogenase (EC 1.2.1.10)

[0631] The present disclosure describes enzymes that can catalyze the following reaction:

acetaldehyde+coenzyme A+NAD⁺↔acetyl-CoA+NADH+H+

[0632] E. coli mhpF encodes an acylating acetaldehyde dehydrogenase. MhpF is active as a monomer; the rate-limiting step of the reaction appears to be transthioesterification. MhpF is involved in synthesis of n-butanol in an engineered reversal of the β-oxidation pathway. The expression of MhpE is translationally coupled to MhpF, and interaction between the two proteins appears to be required for solubility of MhpE.

[0633] E. coli AdhE is a homopolymeric protein with three Fe²⁺-dependent catalytic functions: alcohol dehydrogenase, coenzyme A-dependent acetaldehyde dehydrogenase, and pyruvate formate-lyase deactivase. However, the existence of the pyruvate formate-lyase deactivase activity of AdhE has been debated. The homopolymeric structure of AdhE is unusual in that 20-60 subunits are helically arranged to form rod-like ultrastructures. Under fermentative conditions AdhE catalyzes the reduction of acetyl-CoA to acetaldehyde and the latter compound to ethanol. Aerobically, in the reverse direction, AdhE can catalyze the oxidation of acetaldehyde to acetyl-CoA. Expression of adhE appears to be regulated at the transcriptional and translational levels, and possibly at the posttranslational level. Expression of adhE is approximately 10-fold higher during anaerobic growth than during aerobic growth. The AdhE from E. coli B was partially purified and characterized in early work. It was later purified to homogeneity from E. coli B and its coenzyme A-linked aldehyde dehydrogenase activity was subjected to detailed kinetic analysis. A bi-uni-uni-uni ping-pong mechanism was proposed. AdhE from Salmonella enterica subsp. enterica serovar Typhimurium showed 70% amino acid sequence identity to that of E. coli. It had a lower Km for alcohol substrates and some differences in substrate specificity as compared to the E. coli enzyme. In the metabolic engineering field, deletion of adhE is a determinant in the production of compounds such as succinate, D-lactate, and polyhydroxyalkanoates.

[0634] Chlamydomonas reinhardtii ADH1 encodes a dual function alcohol dehydrogenase/acetaldehyde dehydrogenase. It appears to be active under anoxic conditions and participates in two different anaerobic ethanol production pathways in Chlamydomonas.

[0635] DmpF is an acylating acetaldehyde dehydrogenase from Pseudomonas sp. The final two steps of the meta-cleavage pathway in Pseudomonas sp. CF600 involve the conversion of (S)-4-hydroxy-2-oxopentanoate to pyruvate and acetyl-CoA by the enzymes 4-hydroxy-2-oxovalerate aldolase and acetaldehyde dehydrogenase (acylating). Biochemical studies demonstrated that these two enzymes comprise a bifunctional aldolase-dehydrogenase heterodimer, and suggest that the product of the aldolase reaction, acetaldehyde, is transferred to the dehydrogenase active site via a channeling mechanism. This minimizes the risk to the cells posed by the toxic acetaldehyde.

[0636] The presence of the todI gene product in Pseudomonas putida F1 was suggested by the protein expression pattern of plasmid constructs. The predicted amino acid sequence of the todI gene product showed very high identity with other bacterial acylating aldehyde dehydrogenase gene products.

[0637] The adhE gene of Clostridium acetobutylicum ATCC 824 encodes a multifunctional enzyme that has both alcohol dehydrogenase and acetaldehyde dehydrogenase activities. Both activities are necessary for the formation of butan-1-ol and ethanol during solventogenesis. The adhE gene is part of the sol operon, which is located on the pSOL1 megaplasmid. Expression of the gene from a plasmid in Clostridium acetobutylicum ATCC 824 resulted in elevated activities of NADH-dependent butanol dehydrogenase, NAD-dependent acetaldehyde dehydrogenase and butyraldehyde dehydrogenase, and a small increase in NADH-dependent ethanol dehydrogenase. Complementation of a mutant deficient in butyraldehyde dehydrogenase, acetoacetate decarboxylase, and acetoacetyl-coenzyme A:acetate/butyrate:coenzyme A-transferase activities, which produces neither butanol nor acetone, by the adhE gene resulted in restored butanol formation without any acetone formation or any significant increase in ethanol production, suggesting that the primary role of the enzyme is in butanol formation, providing both a butanal dehydrogenase activity (converting butanoyl-CoA to butan-1-al) and butanol dehydrogenase activity. In addition, inactivation of the gene drastically reduced butanol production (by 85%), supporting this role. Another gene from the pSOL1 plasmid, adhE2, encodes a second multifunctional aldehyde/alcohol dehydrogenase involved in butanol production. However, that enzyme is produced only under alcohologenic conditions, and is not expressed under solventogenic conditions. The gene from strain ATCC 824 was originally called aad.

[0638] Acetaldehyde dehydrogenase activities have also been described from Leuconostoc mesenteroides, Pelobacter acetylenicus and Pseudomonas putida. The partially purified Leuconostoc mesenteroides CoA-dependent aldehyde dehydrogenase could not be separated from an NAD-linked alcohol dehydrogenase that co-purified with it. The enzyme was specific to NAD and could not use NADP. While acetaldehyde and 1-propanal were the best substrates, the enzyme could also use butan-1-al (31% of activity with acetaldehyde) and isobutanal (14%).

[0639] In some embodiments, the enzyme having acetaldehyde dehydrogenase activity is encoded by an amino acid sequence having at least 70% sequence identity, having at least 80% sequence identity, or having at least 90% sequence identity to an enzyme having acetaldehyde dehydrogenase activity selected from E. coli mhpF, E. coli AdhE, Chlamydomonas reinhardtii ADH1, Leuconostoc mesenteroides CoA-dependent acetaldehyde dehydrogenase, Pelobacter acetylenicus acetaldehyde dehydrogenase, Pseudomonas sp. dmpF, Pseudomonas putida acylating aldehyde dehydrogenase todI, Pseudomonas putida acetaldehyde dehydrogenase cmtH and Clostridium acetobutylicum alcohol/aldehyde dehydrogenase AdhE. In some embodiments, the one or more nucleic acid molecule encoding an enzyme having acetaldehyde dehydrogenase activity comprises an amino acid sequence selected from UniProt ID P77580, UniProt P0A9Q7, UniProt ID A8JI07, UniProt ID Q52060, UniProt ID Q51949 and UniProt ID P33744. In a further embodiment, the one or more nucleic acid molecule encoding an enzyme having acetaldehyde dehydrogenase activity is encoded by a nucleic acid sequence selected from Gene ID 945008, Gene ID 945837, Gene ID 5729132, GenBank accession X60835.1, GenBank accession U09250.1 and Gene ID 1116167.

### Ethanolamine Ammonia Lyase (EC 4.3.1.7)

[0640] The present disclosure describes enzymes that can catalyze the following reaction:

ammonium+acetaldehyde↔ethanolamine

[0641] Ethanolamine ammonia-lyase (EAL) allows E. coli to utilize ethanolamine as the sole source of nitrogen and carbon in the presence of external vitamin B12. EAL is an adenosylcobalamin-dependent enzyme that is spontaneously inactivated by its substrate and can be reactivated by EutA. The enzyme was first studied in the non-K-12 strain NCIB 8114. Crystal structures of an N-terminally truncated, but active form of the enzyme both in binary and ternary complexes with the cofactor and substrate have been solved. The enzyme is composed of a hexamer of (αβ)2 dimers, with the α subunit holding the active site and the cobalamin cofactor bound at the interface between the α and β subunits. The authors propose a reaction mechanism that is consistent with a previously described mechanism for adenosylcobalamin-dependent rearrangements. The stereochemical course of the reaction has been modeled on the basis of crystal structures, accounting for the apparent lack of stereospecificity of the enzyme. Production of EAL is catabolite repressed and is induced by the simultaneous presence of ethanolamine and the adenosylcobalamin cofactor. Ethanolamine ammonia-lyase comprises two subunits, α (EutB) and β (EutC).

[0642] In some embodiments, the enzyme having ethanolamine ammonia lyase activity is encoded by an amino acid sequence having at least 70% sequence identity, having at least 80% sequence identity, or having at least 90% sequence identity to an E. coli enzyme having ethanolamine ammonia lyase activity. In some embodiments, the one or more nucleic acid molecule encoding an ethanolamine ammonia lyase subunit comprises an amino acid sequence selected from UniProt ID P0AEJ6 and UniProt ID P19636. In a further embodiment, the one or more nucleic acid molecule encoding an ethanolamine ammonia lyase subunit is encoded by a nucleic acid sequence selected from Gene ID 946924 and Gene ID 946925.

### Serine Aminase (EC 2.6.1.-)

[0643] The present disclosure describes enzymes that can catalyze the following reaction:

L-Serine+NH4⁺→(S)-2,3-diaminopropanoate

[0644] In some embodiments, an enzyme having serine aminase activity can be a serine-glyoxylate transaminase. In other embodiments, an enzyme having serine aminase activity can be a serine-pyruvate transaminase (see above).

[0645] Serine-glyoxylate aminotransferase catalyzes the transfer of the α-amino group of L-serine to glyoxylate, forming glycine and hydroxypyruvate. In the serine-cycle methylotrophs this enzyme plays two important roles: the formation of an acceptor (glycine) for a one-carbon unit, and the conversion of L-serine to hydroxypyruvate in the assimilatory pathway. This is the first microbial serine-glyoxylate aminotransferase to be purified, and a few years later the gene encoding it was identified as well.

[0646] Serine: glyoxylate aminotransferase encoded by Arabidopsis thaliana AGT1 is a homodimer. The purified recombinant protein has the highest activity with the serine: glyoxylate transamination. It also catalyzed alanine: glyoxylate transamination and serine: pyruvate transamination with much lower specific activity.

[0647] sgaA is presumed to be the gene encoding serine-glyoxylate aminotransferase on the Methylobacterium extorquens chromosome. While the product of the cloned gene has not been expressed, mutation complementation was used to investigate its role. Mutations in this gene have abolished the ability to grow on C1 compounds, and complementation of the mutants by a cloned intact version of the gene fragment has restored activity. In addition, sgaA sequence is similar to a number of aminotransferases.

[0648] In further embodiments, an enzyme having serine aminase activity can be an enzyme having phosphoserine aminotransferase activity. In some embodiments, the one or more nucleic acid molecules encoding the phosphoserine aminotransferase is serC, or homolog thereof. In another embodiment, the one or more nucleic acid molecules encoding an enzyme having phosphoserine aminotransferase activity, an enzyme having L-serine transaminase activity, or an enzyme having serine aminotransferase activity comprise an amino acid sequence set forth in SEQ ID NO: 230. In a further embodiment, the one or more nucleic acid molecule encoding an enzyme having phosphoserine aminotransferase activity, an enzyme having L-serine transaminase activity, or an enzyme having serine aminotransferase activity is encoded by a nucleic acid sequence set forth in SEQ ID NO: 229. In some embodiments, the enzyme having phosphoserine aminotransferase activity is Homo sapiens PSAT1, or homolog thereof. In one embodiment, the one or more nucleic acid molecule encoding an enzyme having phosphoserine aminotransferase activity comprises an amino acid sequence set forth in UniProt ID Q9Y617. In another embodiment, the one or more nucleic acid molecule encoding an enzyme having phosphoserine aminotransferase activity is encoded by a nucleic acid sequence set forth in Gene ID 29968.

[0649] In some embodiments, the enzyme having serine aminase activity is encoded by an amino acid sequence having at least 70% sequence identity, having at least 80% sequence identity, or having at least 90% sequence identity to an Arabidopsis thaliana serine-glyoxylate aminotransferase AGT1, Hyphomicrobium methylovorum GM2 serine-glyoxylate aminotransferase sgaA and Methylobacterium extorquens sgaA. In some embodiments, the one or more nucleic acid molecule encoding an enzyme having serine-glyoxylate aminotransferase activity comprises an amino acid sequence selected from UniProt ID Q56YA5 and UniProt ID O08374. In a further embodiment, the one or more nucleic acid molecule encoding an enzyme having serine-glyoxylate aminotransferase activity is encoded by a nucleic acid sequence selected from TAIR accession AT2G13360, GenBank accession D86125.1 and GenBank accession L27235.1.

[0650] In some embodiments, an enzyme having serine aminase activity is a serine-pyruvate aminotransferase. In some embodiments, the serine-pyruvate aminotranserase is encoded by an amino acid sequence having at least 70% sequence identity, having at least 80% sequence identity, or having at least 90% sequence identity to Homo sapiens AGXT1. In some embodiments, the serine-pyruvate aminotranserase is Homo sapiens AGXT1. In some embodiments, the one or more nucleic acid molecules encoding the serine-pyruvate aminotranserase is AGXT1, or homolog thereof. In some embodiments, the one or more nucleic acid molecules encoding a serine-pyruvate aminotransferase comprise an amino acid sequence set forth in SEQ ID NO: 244. In a further embodiment, the one or more nucleic acid molecule encoding a serine-pyruvate aminotranserase is encoded by a nucleic acid sequence set forth in SEQ ID NO: 243.

[0651] In some embodiments, an enzyme having serine aminase activity is an enzyme having alanine-glyoxylate aminotransferase activity. In some embodiments, the enzyme having alanine-glyoxylate aminotransferase activity is encoded by an amino acid sequence having at least 70% sequence identity, having at least 80% sequence identity, or having at least 90% sequence identity to an enzyme having alanine-glyoxylate aminotransferase activity selected from Saccharomyces cerevisiae AGX1, Homo sapiens AGXT2, Arabidopsis thaliana AOAT1 and Arabidopsis thaliana AOAT2. In some embodiments, the one or more nucleic acid molecule encoding an enzyme having alanine-glyoxylate aminotransferase activity comprises an amino acid sequence selected from UniProt ID P43567, UniProt ID Q9BYV1, UniProt ID Q9LR30 and UniProt ID Q9S7E9. In a further embodiment, the one or more nucleic acid molecule encoding an enzyme having alanine-glyoxylate aminotransferase activity is encoded by a nucleic acid sequence selected from Gene ID 850514, Gene ID 64902, TAIR accession AT1G23310 and TAIR accession AT1 G70580.

[0652] In some embodiments, an enzyme having serine aminase activity is an enzyme having alanine transaminase activity. In some embodiments, the enzyme having alanine transaminase activity is encoded by an amino acid sequence having at least 70% sequence identity, having at least 80% sequence identity, or having at least 90% sequence identity to an enzyme having alanine transaminase activity selected from E. coli glutamate-pyruvate aminotransferase alaA, E. coli glutamate-pyruvate aminotransferase alaB, E. coli glutamate-pyruvate aminotransferase alaC, Homo sapiens alanine aminotransferase 1 (GPT), Homo sapiens alanine aminotransferase 2 (GPT2), Arenicola marina alanine transaminase, Arabidopsis thaliana tryptophan aminotransferase TAA1, Arabidopsis thaliana AOAT1, Arabidopsis thaliana AOAT2, Candida maltosa alanine aminotransferase, Clostridium propionicum alanine aminotransferase, Pyrococcus furiosus alanine aminotransferase aat, Megathyrsus maximus alanine transaminase, and Panicum miliaceum alanine transaminase AlaAT-2. In some embodiments, the one or more nucleic acid molecule encoding an enzyme having alanine transaminase activity comprises an amino acid sequence selected from UniProt ID P0A959, UniProt ID P77434, UniProt ID P24298, UniProt ID Q8TD30, UniProt ID Q9S7N2, UniProt ID Q9LR30, UniProt ID Q9S7E9, UniProt ID Q9P9M8, and UniProt ID P34106. In a further embodiment, the one or more nucleic acid molecule encoding an enzyme having alanine transaminase activity is encoded by a nucleic acid sequence selected from Gene ID 946772, Gene ID 946850, Gene ID 2875, Gene ID 84706, Gene ID 843393, TAIR accession AT1G23310, TAIR accession AT1G70580, GenBank accession AF163769.1 and GenBank accession X69421.1.

2,3-diaminopropionate Ammonia-Lyase (EC 4.3.1.15)

[0653] The present disclosure describes enzymes that can catalyze the following reaction:

2 ammonium+pyruvate↔2,3-diaminopropanoate+H₂O

[0654] 2,3-Diaminopropionate ammonia-lyase is not stereospecific and catalyzes the α,β-elimination of both the D and L stereoisomer of 2,3-diaminopropionate. The enzyme also exhibits weak activity toward D-serine, and does not exhibit activity toward L-serine, D-β-Cl-alanine, or L-β-Cl-alanine.

[0655] The enzyme is homodimeric and contains a pyridoxal 5′-phosphate prosthetic group, belonging to the fold-type II family of PLP-containing enzymes. Crystal structures of the apo- and holoenzyme and the enzyme in complex with a reaction intermediate and substrate have been solved. Kinetic properties of mutants in active site residues were analyzed, and a reaction mechanism was proposed.

[0656] In some embodiments, an enzyme having 2,3-diaminopropionate ammonia-lyase activity is encoded by an amino acid sequence having at least 70% sequence identity, having at least 80% sequence identity, or having at least 90% sequence identity to E. coli 2,3-diaminopropionate ammonia-lyase ygeX. In other embodiments, the enzyme having 2,3-diaminopropionate ammonia-lyase activity is E. coli ygeX. In some embodiments, the one or more nucleic acid molecule encoding an enzyme having 2,3-diaminopropionate ammonia-lyase activity comprises an amino acid sequence set forth in UniProt ID P66899. In further embodiments, the one or more nucleic acid molecule encoding an enzyme having 2,3-diaminopropionate ammonia-lyase activity is encoded by a nucleic acid sequence set forth in Gene ID 947012.

### Glyoxylate Shunt

[0657] The glyoxylate cycle, a variation of the tricarboxylic acid cycle, is an anabolic pathway occurring in plants, bacteria, protists, and fungi. The glyoxylate cycle centers on the conversion of acetyl-CoA to succinate for the synthesis of carbohydrates. In microorganisms, the glyoxylate cycle allows cells to utilize simple carbon compounds as a carbon source when complex sources such as glucose are not available. The cycle is generally assumed to be absent in animals, with the exception of nematodes at the early stages of embryogenesis. In recent years, however, the detection of malate synthase and isocitrate lyase, key enzymes involved in the glyoxylate cycle, in some animal tissue has raised questions regarding the evolutionary relationship of enzymes in bacteria and animals and suggests that animals encode alternative enzymes of the cycle that differ in function from known malate synthase and isocitrate lyase in non-metazoan species.

[0658] The glyoxylate cycle utilizes five of the eight enzymes associated with the tricarboxylic acid cycle: citrate synthase, aconitase, succinate dehydrogenase, fumarase, and malate dehydrogenase. The two cycles differ in that in the glyoxylate cycle, isocitrate is converted into glyoxylate and succinate by isocitrate lyase instead of into α-ketoglutarate. This bypasses the decarboxylation steps that take place in the TCA cycle, allowing simple carbon compounds to be used in the later synthesis of macromolecules, including glucose. Glyoxylate is subsequently combined with acetyl-CoA to produce malate, catalyzed by malate synthase. Malate is also formed in parallel from succinate by the action of succinate dehydrogenase and fumarase.

[0659] Fatty acids from lipids are commonly used as an energy source by vertebrates as fatty acids are degraded through beta oxidation into acetate molecules. This acetate, bound to the active thiol group of coenzyme A, enters the citric acid cycle (TCA cycle) where it is fully oxidized to carbon dioxide. This pathway thus allows cells to obtain energy from fat. To utilize acetate from fat for biosynthesis of carbohydrates, the glyoxylate cycle, whose initial reactions are identical to the TCA cycle, is used.

[0660] Cell-wall containing organisms, such as plants, fungi, and bacteria, require very large amounts of carbohydrates during growth for the biosynthesis of complex structural polysaccharides, such as cellulose, glucans, and chitin. In these organisms, in the absence of available carbohydrates (for example, in certain microbial environments or during seed germination in plants), the glyoxylate cycle permits the synthesis of glucose from lipids via acetate generated in fatty acid P3-oxidation.

[0661] The glyoxylate cycle bypasses the steps in the citric acid cycle where carbon is lost in the form of CO₂. The two initial steps of the glyoxylate cycle are identical to those in the citric acid cycle: acetate→citrate→isocitrate. In the next step, catalyzed by the first glyoxylate cycle enzyme, isocitrate lyase, isocitrate undergoes cleavage into succinate and glyoxylate (the latter gives the cycle its name). Glyoxylate condenses with acetyl-CoA (a step catalyzed by malate synthase), yielding malate. Both malate and oxaloacetate can be converted into phosphoenolpyruvate, which is the product of phosphoenolpyruvate carboxykinase, the first enzyme in gluconeogenesis. The net result of the glyoxylate cycle is therefore the production of glucose from fatty acids. Succinate generated in the first step can enter into the citric acid cycle to eventually form oxaloacetate.

### Biosynthesis of MEG (or Glycolic Acid), or MEG (or GA) and One or More Co-Product Using a Recombinant Microorganism

[0662] As discussed above, in one aspect, the present disclosure provides a recombinant microorganism comprising one or more biochemical pathway that produces one or more products derived from D-glyceraldehyde-3-phosphate (G3P) and glycolaldehyde from one or more pentose and/or hexose sugars via a pentose-phosphate intermediate. In one embodiment, the recombinant microorganism co-produces monoethylene glycol (MEG) and one or more co-products. In another embodiment, the one or more co-products are selected from acetone, isopropanol, propene, L-serine, glycine, monoethanolamine (MEA), ethylenediamine, or a combination thereof. In yet a further embodiment, the one or more product is selected from monoethylene glycol (MEG) and glycolic acid (GA).

[0663] Therefore, in one embodiment, the application relates to a recombinant microorganism comprising one or more biochemical pathway comprising at least one enzyme having an activity that converts one or more pentose and/or hexose sugars in a lossless conversion to pentose-phosphate intermediate and comprising at least one enzyme having a pentose-phosphate aldolase activity that converts the pentose-phosphate intermediate to glycolaldehyde and D-glyceraldehyde-3-phosphage (G3P).

[0664] In some embodiments, the pentose-phosphate intermediate is D-ribose-5-phosphate, D-ribulose-5-phosphate or D-xylulose-5-phosphate. In some embodiments, the at least one enzyme having pentose-phosphate aldolase activity has D-ribose-5-phosphate aldolase activity, D-ribulose-5-phosphate aldolase activity, or D-xylulose-5-phosphate aldolase activity.

[0665] In some embodiments, the recombinant microorganism comprises expression of at least one enzyme having transketolase activity and expression of at least one enzyme having pentose-phosphate aldolase activity. In some embodiments, the enzyme having transketolase activity is encoded by an amino acid sequence having at least 70% sequence identity, at least 80% sequence identity, or at least 90% sequence identity to tktA from E. coli. In other embodiments, the enzyme having transketolase activity is tktA from E. coli. In some embodiments, the enzyme having transketolase activity is encoded by an amino acid sequence having at least 70% sequence identity at least 80% sequence identity, or at least 90% sequence identity to tktB from E. coli. In other embodiments, the enzyme having transketolase activity is tktB from E. coli. In another embodiment, the one or more nucleic acid molecules encoding the enzyme having transketolase activity comprises an amino acid sequence selected from the group consisting of SEQ ID NOs: 148 and 150. In some embodiments, the one or more nucleic acid molecules encoding the enzyme having transketolase activity is tktA, or homolog thereof. In some embodiments, the one or more nucleic acid molecules encoding the enzyme having transketolase activity is tktB, or homolog thereof. In a further embodiment, the one or more nucleic acid molecule encoding the enzyme having transketolase activity is encoded by a nucleic acid sequence selected from the group consisting of SEQ ID NOs: 147 and 149. In some embodiments, the enzyme having pentose-phosphate aldolase activity is encoded by an amino acid sequence having at least 70% sequence identity, at least 80% sequence identity, or at least 90% sequence identity to deoC from E. coli. In other embodiments, the enzyme having pentose-phosphate aldolase activity is deoC from E. coli.

[0666] In some embodiments, the recombinant microorganism comprises expression of at least one enzyme having transaldolase activity. In some embodiments, the enzyme having transaldolase activity is encoded by an amino acid sequence having at least 70% sequence identity, at least 80% sequence identity, or at least 90% sequence identity to talA or talB from E. coli. In some embodiments, the enzyme having transaldolase activity is talA from E. coli. In other embodiments, the enzyme having transaldolase activity is talB from E. coli. In another embodiment, the one or more nucleic acid molecules encoding the enzyme having transaldolase activity comprises an amino acid sequence selected from the group consisting of SEQ ID NOs: 152 and 154. In a further embodiment, the one or more nucleic acid molecule encoding the enzyme having transaldolase activity is encoded by a nucleic acid sequence selected from the group consisting of SEQ ID NOs: 151 and 153.

[0667] In some embodiments, the recombinant microorganism comprises expression of at least one enzyme having ribulose-5-phosphate 3-epimerase activity. In some embodiments, the enzyme having ribulose-5-phosphate 3-epimerase activity is encoded by an amino acid sequence having at least 70% sequence identity, at least 80% sequence identity, or at least 90% sequence identity to rpe from E. coli. In other embodiments, the enzyme having ribulose-5-phosphate 3-epimerase activity is rpe from E. coli. In another embodiment, the one or more nucleic acid molecules encoding the enzyme having ribulose-5-phosphate 3-epimerase activity comprise an amino acid sequence set forth in SEQ ID NO: 158. In a further embodiment, the one or more nucleic acid molecule encoding the enzyme having ribulose-5-phosphate 3-epimerase activity is encoded by a nucleic acid sequence set forth in SEQ ID NO: 157.

[0668] In some embodiments, the recombinant microorganism comprises expression of at least one enzyme having ribose-5-phosphate isomerase activity. In some embodiments, the enzyme having ribose-5-phosphate isomerase activity is encoded by an amino acid sequence having at least 70% sequence identity, at least 80% sequence identity, or at least 90% sequence identity to rpiA from E. coli. In other embodiments, the enzyme having ribose-5-phosphate isomerase activity is rpiA from E. coli. In other embodiments, the enzyme having ribose-5-phosphate isomerase activity is encoded by an amino acid sequence having at least 70% sequence identity, at least 80% sequence identity, or at least 90% sequence identity to rpiB from E. coli. In other embodiments, the enzyme having ribose-5-phosphate isomerase activity is rpiB from E. coli. In another embodiment, the one or more nucleic acid molecules encoding enzyme having ribose-5-phosphate isomerase activity comprise an amino acid sequence set forth in SEQ ID NO: 156. In a further embodiment, the one or more nucleic acid molecule encoding the enzyme having ribose-5-phosphate isomerase activity is encoded by a nucleic acid sequence set forth in SEQ ID NO: 155.

[0669] In some embodiments, the recombinant microorganism comprising expression of at least one enzyme having an activity selected from a transketolase activity, a transaldolase activity, a ribulose-5-phosphate 3-epimerase activity, a ribose-5-phosphate isomerase activity and a D-ribose-5-phosphate aldolase activity, further comprises a deleted or diminished activity in one or more endogenous enzymes selected from glyceraldehyde 3-phosphate dehydrogenase, phosphoglycerate kinase and phosphoglycerate mutase. In some embodiments, the endogenous glyceraldehyde 3-phosphate dehydrogenase enzyme is gapA, the phosphoglycerate kinase is pgk and the phosphoglycerate mutase is gpmA or gpmM.

[0670] In some embodiments, the recombinant microorganism comprises expression of at least one enzyme having fructose-6-phosphate phosphoketolase activity. In some embodiments, an enzyme having fructose-6-phosphate phosphoketolase activity is encoded by an amino acid sequence having at least 70% sequence identity, at least 80% sequence identity, or at least 90% sequence identity to an enzyme having fructose-6-phosphate phosphoketolase activity selected from the group consisting of Bifidobacterium dentium BDP_1006, Bifidobacterium lactis xfp, Lactobacillus paraplantarum xpkA and Bifidobacterium breve xfp. In a preferred embodiment, an enzyme having fructose-6-phosphate phosphoketolase activity is selected from the group consisting of Bifidobacterium dentium BDP_1006, Bifidobacterium lactis xfp, Lactobacillus paraplantarum xpkA and Bifidobacterium breve xfp. In another embodiment, the one or more nucleic acid molecules encoding the enzyme having fructose-6-phosphate phosphoketolase activity comprise an amino acid sequence selected from the group consisting of SEQ ID NOs: 212, 214, 216 and 218. In a further embodiment, the one or more nucleic acid molecule encoding the enzyme having fructose-6-phosphate phosphoketolase activity is encoded by a nucleic acid sequence selected from the group consisting of SEQ ID NOs: 211, 213, 215 and 217.

[0671] In some embodiments, the recombinant microorganism comprises expression of at least one enzyme having phosphate acetyltransferase activity. In some embodiments, an enzyme having phosphate acetyltransferase activity is encoded by an amino acid sequence having at least 70% sequence identity, at least 80% sequence identity, or at least 90% sequence identity to an enzyme having phosphate acetyltransferase activity selected from E. coli pta and Clostridium acetobutylicum pta. In a preferred embodiment, an enzyme having phosphate acetyltransferase activity is selected from E. coli pta and Clostridium acetobutylicum pta. In another embodiment, the one or more nucleic acid molecules encoding the enzyme having phosphate acetyltransferase activity comprise an amino acid sequence selected from SEQ ID NOs: 220 and 222. In a further embodiment, the one or more nucleic acid molecule encoding the enzyme having phosphate acetyltransferase activity is encoded by a nucleic acid sequence selected from SEQ ID NOs: 219 and 221.

[0672] In some embodiments, the recombinant microorganism comprising expression of at least one enzyme having an activity selected from a fructose-6-phosphate phosphoketolase activity, a phosphate acetyltransferase activity, a transketolase activity, a transaldolase activity, a ribulose-5-phosphate 3-epimerase activity, a ribose-5-phosphate isomerase activity and a D-ribose-5-phosphate aldolase activity, further comprises a deleted or diminished activity in an endogenous 6-phosphofructokinase enzyme. In some embodiments, the endogenous 6-phosphofructokinase enzyme is pfkA and/or pfkB.

[0673] In some embodiments, the one or more pentose and/or hexose sugars comprise D-xylose and the recombinant microorganism further comprises expression of at least one enzyme having xylose isomerase activity and expression of at least one enzyme having xylulose 5-kinase activity. In some embodiments, the at least one enzyme having xylose isomerase activity is encoded by an amino acid sequence having at least 70% sequence identity, at least 80% sequence identity, or at least 90% sequence identity to xylA from E. coli or Pyromyces sp. In a preferred embodiment, an enzyme having xylose isomerase activity is selected from E. coli xylA and Pyromyces sp xylA. In yet another embodiment, the one or more nucleic acid molecules encoding the xylose isomerase comprises an amino acid sequence selected from SEQ ID NOs: 95 and 144. In a further embodiment, the one or more nucleic acid molecules encoding the xylose isomerase is encoded by a nucleic acid sequence selected from the group consisting of SEQ ID NOs: 93, 94 and 143. In some embodiments, the at least one enzyme having xylulose 5-kinase activity is encoded by an amino acid sequence having at least 70% sequence identity, at least 80% sequence identity, or at least 90% sequence identity to xylB from E. coli. In a preferred embodiment, an enzyme having xylulose 5-kinase activity is E. coli xylB. In another embodiment, the one or more nucleic acid molecules encoding the D-xylulose 5-kinase comprises an amino acid sequence set forth in SEQ ID NO: 146. In a further embodiment, the one or more nucleic acid molecules encoding the D-xylulose 5-kinase is encoded by a nucleic acid sequence set forth in SEQ ID NO: 145.

[0674] In some embodiments, the one or more pentose and/or hexose sugars comprise D-fructose and the recombinant microorganism further comprises expression of at least one enzyme having fructose 1,6-bisphosphatase activity. In one embodiment, the at least one enzyme having fructose 1,6-bisphosphatase activity is encoded by an amino acid sequence having at least 70% sequence identity, at least 80% sequence identity, or at least 90% sequence identity to fbp from E. coli. In a preferred embodiment, an enzyme having fructose 1,6-bisphosphatase activity is E. coli fbp. In some embodiments, the enzyme having fructose 1,6-bisphosphatase activity converts D-fructose 1,6-bisphosphate to D-fructose 6-phosphate. In other embodiments, D-fructose is converted to fructose 1,6-bisphoshate by endogenous enzymes in the recombinant microorganism.

[0675] In some embodiments of any of the recombinant microorganisms described above, the recombinant microorganism further comprises a deleted or diminished activity in one or more endogenous enzymes selected from glucose 6-phosphate-1-dehydrogenase, 6-phosphogluconolactonase, and 6-phosphogluconate dehydrogenase. In further embodiments, the glucose 6-phosphate-1-dehydrogenase is zwf, the 6-phosphogluconolactonase is pgl, and the 6-phosphogluconate dehydrogenase is gnd.

[0676] In some embodiments, the one or more pentose and/or hexose sugars are capable of being converted to one or more intermediate in the non-oxidative pentose phosphate pathway of the recombinant microorganism. In other embodiments, the one or more pentose and/or hexose sugars are comprised of monomers, oligomers, or a combination thereof.

[0677] In some embodiments, the expression of at least one enzyme having transketolase activity and/or fructose-6-phosphate phosphoketolase activity and the expression of at least one enzyme having D-ribose 5-phosphate aldolase activity enables a lossless conversion of one or more pentose and/or hexose sugars to D-ribose-5-phosphate intermediate and the subsequent conversion of D-ribose-5-phosphate to G3P and glycolaldehyde.

[0678] In some embodiments, the recombinant microorganism produces MEG or glycolic acid (GA) through the conversion of of glycolaldehyde in a C2 pathway and through the conversion of G3P in one or more C3 pathways. In some embodiments, MEG is produced by the reduction of glycolaldehyde by an enzyme having glycolaldehyde reductase activity in a C2 pathway. In other embodiments, GA is produced by the oxidation of glycolaldehyde by an enzyme having glycolaldehyde dehydrogenase activity in a C2 pathway.

[0679] In some embodiments, the at least one enzyme for the production of MEG or GA are selected from at least one enzyme having an activity selected from a 3-phosphoglycerate dehydrogenase activity, a phosphoserine aminotransferase activity, a serine transaminase activity, a 3-phosphohydroxypyruvate phosphatase activity, a phosphoserine phosphatase activity, a hydroxypyruvate decarboxylase activity, a 3-phosphohydroxypyruvate reductase activity, a glycolaldehyde reductase activity, a glycolaldehyde dehydrogenase activity, a serine oxidoreductase (deaminating) or serine-pyruvate aminotransferase activity, a serine decarboxylase activity, an ethanolamine aminotransferase or ethanolamine oxidoreductase (deaminating) activity, a glycerate decarboxylase activity, a hydroxypyruvate reductase activity, a 3-phosphoglycerate phosphatase activity, a 2-phosphoglycerate phosphatase activity, a glycerate 3-kinase activity, a glycerate 2-kinase activity, and a glyoxylate reductase activity.

[0680] In some embodiments, the recombinant microorganism produces MEG through the conversion of glycolaldehyde in a C2 pathway and produces one or more co-product through the conversion of G3P in one or more C3 pathways. In other embodiments, the one or more co-product is selected from acetone, isopropanol, propene, isobutene and one or more serine pathway compounds. In some preferred embodiments, the one or more serine pathway compounds is selected from serine, glycine, monoethanolamine (MEA) and ethylenediamine (EDA).

[0681] In some embodiments, the at least one enzyme for the production of one or more co-product through the conversion of G3P in one or more C3 pathways are selected from at least one enzyme having an activity selected from a thiolase or acetyl coenzyme A acetyltransferase activity, an acetyl-CoA:acetoacetate transferase or acetate:acetoacetyl-CoA hydrolase activity, and an acetoacetate decarboxylase activity, and the one or more co-product comprises acetone.

[0682] In some embodiments, the at least one enzyme for the production of one or more co-product through the conversion of G3P in one or more C3 pathways are selected from at least one enzyme having an activity selected from a thiolase or acetyl coenzyme A acetyltransferase activity, an acetyl-CoA:acetoacetate transferase or acetate:acetoacetyl-CoA hydrolase activity, an acetoacetate decarboxylase activity, and a secondary alcohol dehydrogenase activity, and the one or more co-product comprises isopropanol.

[0683] In some embodiments, the at least one enzyme for the production of one or more co-product through the conversion of G3P in one or more C3 pathways are selected from at least one enzyme having an activity selected from a thiolase or acetyl coenzyme A acetyltransferase activity, an acetyl-CoA:acetoacetate transferase or acetate:acetoacetyl-CoA hydrolase activity, an acetoacetate decarboxylase activity, a secondary alcohol dehydrogenase activity, and a dehydratase activity, and the one or more co-product comprises propene.

[0684] In some embodiments, the at least one enzyme for the production of one or more co-product through the conversion of G3P in one or more C3 pathways are selected from at least one enzyme having an activity selected from a thiolase or acetyl coenzyme A acetyltransferase activity, an acetyl-CoA:acetoacetate transferase or acetate:acetoacetyl-CoA hydrolase activity, an acetoacetate decarboxylase activity, a 3-hydroxyisovalerate (3HIV) synthase activity, a hydroxymethylglutaryl-CoA synthase activity, a methylglutaconyl-CoA hydratase activity, a methylcrotonyl-CoA carboxylase activity, a methylcrotonyl-CoA hydratase activity, a 3-hydroxyisovaleryl-CoA thioesterase activity, a 3HIV kinase activity, a 3HIV-3-phosphate decarboxylase activity, and a 3HIV decarboxylase activity, and the one or more co-product comprises isobutene.

[0685] In some embodiments, the at least one enzyme for the production of one or more co-product through the conversion of G3P in one or more C3 pathways are selected from at least one enzyme having an activity selected from a 3-phosphoglycerate dehydrogenase activity, a phosphoserine aminotransferase activity, a 3-phosphohydroxypyruvate phosphatase activity, a phosphoserine phosphatase activity, a serine oxidoreductase (deaminating) or serine-pyruvate aminotransferase activity, a hydroxypyruvate reductase activity, a 3-phosphoglycerate phosphatase activity, a 2-phosphoglycerate phosphatase activity, a glycerate 3-kinase activity, and a glycerate 2-kinase activity, and the one or more co-product comprises L-serine.

[0686] In some embodiments, the at least one enzyme for the production of one or more co-product through the conversion of G3P in one or more C3 pathways are selected from at least one enzyme having an activity selected from a serine hydroxymethyltransferase activity, a transferase activity, a formaldehyde dehydrogenase activity, a formate dehydrogenase activity, an activity associated with glycine cleavage system, a 3-phosphoglycerate dehydrogenase activity, a phosphoserine aminotransferase activity, a 3-phosphohydroxypyruvate phosphatase activity, a phosphoserine phosphatase activity, a serine transaminase activity, a hydroxypyruvate decarboxylase activity, a serine oxidoreductase (deaminating) activity, a serine decarboxylase activity, an ethanolamine aminotransferase or ethanolamine oxidoreductase (deaminating) activity, a hydroxypyruvate reductase activity, a 3-phosphoglycerate phosphatase activity, a 2-phosphoglycerate phosphatase activity, a glycerate 3-kinase activity, a glycerate 2-kinase activity, a glycolaldehyde dehydrogenase activity, a glycolate dehydrogenase activity, an alanine-glyoxylate aminotransferase activity, an alanine transaminase activity, an NAD(P)H dependent glutamate dehydrogenase activity, and the one or more co-product comprises glycine. In another embodiment, the activity associated with glycine cleavage system comprise an enzyme or protein selected from a glycine decarboxylase (P protein), an aminomethyltransferase (T protein), a dihydrolipoamide dehydrogenase (L protein), and an H protein.

[0687] In some embodiments, the at least one enzyme for the production of one or more co-product through the conversion of G3P in one or more C3 pathways are selected from at least one enzyme having an activity selected from a 3-phosphoglycerate dehydrogenase activity, a 3-phosphoserine aminotransferase activity, a 3-phosphohydroxypyruvate phosphatase activity, a phosphoserine phosphatase activity, a transaminase activity, a hydroxypyruvate decarboxylase activity, a serine oxidoreductase (deaminating) or serine-pyruvate aminotransferase activity, a serine decarboxylase activity, a hydroxypyruvate reductase activity, a 3-phosphoglycerate phosphatase activity, a 2-phosphoglycerate phosphatase activity, a glycerate 3-kinase activity, a glycerate 2-kinase activity, an acetaldehyde dehydrogenase activity, and an ethanolamine ammonia lyase activity, and the one or more co-product comprises monoethanolamine (MEA).

[0688] In some embodiments, the at least one enzyme for the production of one or more co-product through the conversion of G3P in one or more C3 pathways are selected from at least one enzyme having an activity selected from a serine dehydrogenase activity, a 2-aminomalonate semialdehyde decarboxylase activity, an aminoacetaldehyde transaminase activity, a 2-aminomalonate semialdehyde transaminase activity, a 2,3-diaminopropanoate decarboxylase activity, a serine decarboxylase activity, an ethanolamine dehydrogenase activity, a serine hydroxymethyltransferase activity, an aldehyde oxidase activity, an N-acetyl transferase or O-acetyl transferase activity, an N-acetylserine dehydrogenase activity, a transaminase activity, a deacetylase activity, a serine aminase activity, and a 2,3-diaminopropanoate ammonia lyase activity, and the one or more co-product comprises ethylenediamine (EDA).

[0689] In some embodiments of any of the recombinant microorganisms described above, the recombinant microorganism further comprises one or more modifications to diminish or delete activity in a glycolaldehyde reductase, a glycolaldehyde dehydrogenase, a lactate dehydrogenase, or combination thereof.

[0690] In one embodiment, at least a portion of the excess NADH produced in the C3 pathway is used as a source of reducing equivalents in the C2 pathway. In another embodiment, at least a portion of the excess NADH produced in the C3 pathway is used to produce ATP.

[0691] In one embodiment, excess biomass formation is minimized and production of MEG or glycolic acid or MEG and one or more co-products is maximized.

[0692] Pentose and/or Hexose Sugars to D-Ribose 5-Phosphate Intermediate and Subsequent Conversion of D-Ribose 5-Phosphate Intermediate to Glycolaldehyde and D-Glyceraldehyde 3-Phosphate

[0693] In the present disclosure, pentose and/or hexose sugars are converted into a pentose-phosphate intermediate, an intermediate of the non-oxidative pentose phosphate pathway. The pentose-phosphate intermediate, D-ribose-5-phosphate, D-ribulose-5-phosphate or D-xylulose-5-phosphate, then serves as a substrate for a D-pentose-phosphate aldolase, having D-ribose-5-phosphate aldolase activity, D-ribulose-5-phosphate aldolase activity, or D-xylulose-5-phosphate aldolase activity, to produce glycolaldehyde and D-glyceraldehyde 3-phosphate, compounds which can then be further converted to MEG or GA, or MEG and one or more co-products.

[0694] In the present disclosure, pentose and/or hexose sugars are converted into D-ribose 5-phosphate, an intermediate of the non-oxidative pentose phosphate pathway. The D-ribose 5-phosphate intermediate then serves as a substrate for a D-ribose 5-phosphate aldolase to produce glycolaldehyde and D-glyceraldehyde 3-phosphate, compounds which can then be further converted to MEG or GA, or MEG and one or more co-products.

[0695] [A] Therefore, in one embodiment, the application relates to a recombinant microorganism capable of producing glycolaldehyde and D-glyceraldehyde 3-phosphate (G3P) via a pentose-phosphate intermediate from one or more pentose and/or hexose sugars, wherein the recombinant microorganism expresses one or more of the following from (a) to (h):

[0696] (a) at least one endogenous or exogenous nucleic acid molecule encoding an enzyme having transketolase activity that catalyzes a reversible conversion of D-fructose-6-phosphate and D-glyceraldehyde-3-phosphate to D-erythrose-4-phosphate and D-xylulose-5-phosphate, respectively, and/or that catalyzes a reversible conversion of D-glyceraldehyde-3-phosphate from (b) and D-seduheptulose-7-phosphate from (b) to pentose-phosphate and D-xylulose-5-phosphate, respectively;

[0697] (b) at least one endogenous or exogenous nucleic acid molecule encoding an enzyme having transaldolase activity that catalyzes a reversible conversion of D-fructose-6-phosphate and D-erythrose-4-phosphate from (a) to D-glyceraldehyde-3-phosphate and D-seduheptulose-7-phosphate, respectively;

[0698] (c) at least one endogenous or exogenous nucleic acid molecule encoding an enzyme having ribulose-5-phosphate 3-epimerase activity that catalyzes an interconversion of D-xylulose-5-phosphate from (a) and/or (f) and D-ribulose-5-phosphate;

[0699] (d) at least one endogenous or exogenous nucleic acid molecule encoding an enzyme having ribose-5-phosphate isomerase activity that catalyzes an interconversion of D-ribulose-5-phosphate from (c) and D-ribose-5-phosphate;

[0700] (e) at least one endogenous or exogenous nucleic acid molecule encoding an enzyme having xylose isomerase activity that catalyzes the conversion of D-xylose to D-xylulose;

[0701] (f) at least one endogenous or exogenous nucleic acid molecule encoding an enzyme having xylulose 5-kinase activity that catalyzes the conversion of D-xylulose to D-xylulose-5-phosphate;

[0702] (g) at least one endogenous or exogenous nucleic acid molecule encoding an enzyme having fructose 1,6-bisphosphatase activity that catalyzes the conversion of D-fructose 1,6-bisphosphate to D-fructose 6-phosphate;

[0703] (h) at least one endogenous or exogenous nucleic acid molecule encoding an enzyme having pentose-5-phosphate aldolase activity that catalyzes the conversion of pentose-5-phosphate from (a) and/or (d) to glycolaldehyde and D-glyceraldehyde-3-phosphate;

wherein the recombinant microorganism optionally further comprises a deletion, insertion, or loss of function mutation in a gene encoding a glyceraldehyde 3-phosphate dehydrogenase, and/or a phosphoglycerate kinase and/or a phosphoglycerate mutase;
wherein the one or more pentose and/or hexose sugars are capable of being converted to one or more intermediate in the non-oxidative pentose phosphate pathway of the recombinant microorganism, and wherein glycolaldehyde and D-glyceraldehyde 3-phosphate (G3P) are produced.

[0704] [B] Therefore, in one embodiment, the application relates to a recombinant microorganism capable of producing glycolaldehyde and D-glyceraldehyde 3-phosphate (G3P) via a D-ribose 5-phosphate, ribulose 5-phosphate, or xylulose 5-phosphate intermediate from one or more pentose and/or hexose sugars, wherein the recombinant microorganism expresses one or more of the following from (a) to (h):

[0705] (a) at least one endogenous or exogenous nucleic acid molecule encoding an enzyme having transketolase activity that catalyzes a reversible conversion of D-fructose-6-phosphate and D-glyceraldehyde-3-phosphate to D-erythrose-4-phosphate and D-xylulose-5-phosphate, respectively, and/or that catalyzes a reversible conversion of D-glyceraldehyde-3-phosphate from (b) and D-seduheptulose-7-phosphate from (b) to D-ribose-5-phosphate and D-xylulose-5-phosphate, respectively;

[0706] (b) at least one endogenous or exogenous nucleic acid molecule encoding an enzyme having transaldolase activity that catalyzes a reversible conversion of D-fructose-6-phosphate and D-erythrose-4-phosphate from (a) to D-glyceraldehyde-3-phosphate and D-seduheptulose-7-phosphate, respectively;

[0707] (c) at least one endogenous or exogenous nucleic acid molecule encoding an enzyme having ribulose-5-phosphate 3-epimerase activity that catalyzes an interconversion of D-xylulose-5-phosphate from (a) and/or (f) and D-ribulose-5-phosphate;

[0708] (d) at least one endogenous or exogenous nucleic acid molecule encoding an enzyme having ribose-5-phosphate isomerase activity that catalyzes an interconversion of D-ribulose-5-phosphate from (c) and D-ribose-5-phosphate;

[0709] (e) at least one endogenous or exogenous nucleic acid molecule encoding an enzyme having xylose isomerase activity that catalyzes the conversion of D-xylose to D-xylulose;

[0710] (f) at least one endogenous or exogenous nucleic acid molecule encoding an enzyme having xylulose 5-kinase activity that catalyzes the conversion of D-xylulose to D-xylulose-5-phosphate;

[0711] (g) at least one endogenous or exogenous nucleic acid molecule encoding an enzyme having fructose 1,6-bisphosphatase activity that catalyzes the conversion of D-fructose 1,6-bisphosphate to D-fructose 6-phosphate;

[0712] (h) at least one endogenous or exogenous nucleic acid molecule encoding an enzyme having D-ribose 5-phosphate, ribulose 5-phosphate, or xylulose 5-phosphate aldolase activity that catalyzes the conversion of D-ribose-5-phosphate, ribulose 5-phosphate, or xylulose 5-phosphate from (a) and/or (d) to glycolaldehyde and D-glyceraldehyde-3-phosphate;

wherein the recombinant microorganism optionally further comprises a deletion, insertion, or loss of function mutation in a gene encoding a glyceraldehyde 3-phosphate dehydrogenase, and/or a phosphoglycerate kinase and/or a phosphoglycerate mutase;
wherein the one or more pentose and/or hexose sugars are capable of being converted to one or more intermediate in the non-oxidative pentose phosphate pathway of the recombinant microorganism,
and wherein glycolaldehyde and D-glyceraldehyde 3-phosphate (G3P) are produced.

[0713] [C] In another embodiment, the application relates to a recombinant microorganism capable of producing glycolaldehyde and D-glyceraldehyde 3-phosphate (G3P) via a D-ribose 5-phosphate intermediate from one or more pentose and/or hexose sugars, wherein the recombinant microorganism expresses one or more of the following from (a) to (j):

[0714] (a) at least one endogenous or exogenous nucleic acid molecule encoding an enzyme having fructose-6-phosphate phosphoketolase activity that catalyzes a reversible conversion of D-fructose-6-phosphate to D-erythrose-4-phosphate and acetyl-phosphate;

[0715] (b) at least one endogenous or exogenous nucleic acid molecule encoding an enzyme having phosphate acetyltransferase activity that catalyzes a reversible conversion of acetyl-phosphate from (a) to acetyl-CoA;

[0716] (c) at least one endogenous or exogenous nucleic acid molecule encoding an enzyme having transaldolase activity that catalyzes a reversible conversion of D-fructose-6-phosphate and D-erythrose-4-phosphate from (a) to D-glyceraldehyde-3-phosphate and D-seduheptulose-7-phosphate, respectively;

[0717] (d) at least one endogenous or exogenous nucleic acid molecule encoding an enzyme having transketolase activity that catalyzes a reversible conversion of D-glyceraldehyde-3-phosphate from (c) and D-seduheptulose-7-phosphate from (c) to D-ribose-5-phosphate and D-xylulose-5-phosphate, respectively;

[0718] (e) at least one endogenous or exogenous nucleic acid molecule encoding an enzyme having ribulose-5-phosphate 3-epimerase activity that catalyzes an interconversion of D-xylulose-5-phosphate from (d) and/or (h) and D-ribulose-5-phosphate;

[0719] (f) at least one endogenous or exogenous nucleic acid molecule encoding an enzyme having ribose-5-phosphate isomerase activity that catalyzes an interconversion of D-ribulose-5-phosphate from (e) and D-ribose-5-phosphate;

[0720] (g) at least one endogenous or exogenous nucleic acid molecule encoding an enzyme having xylose isomerase activity that catalyzes the conversion of D-xylose to D-xylulose;

[0721] (h) at least one endogenous or exogenous nucleic acid molecule encoding an enzyme having xylulose 5-kinase activity that catalyzes the conversion of D-xylulose to D-xylulose-5-phosphate;

[0722] (i) at least one endogenous or exogenous nucleic acid molecule encoding an enzyme having fructose 1,6-bisphosphatase activity that catalyzes the conversion of D-fructose 1,6-bisphosphate to D-fructose 6-phosphate;

[0723] (j) at least one endogenous or exogenous nucleic acid molecule encoding an enzyme having D-ribose 5-phosphate aldolase activity that catalyzes the conversion of D-ribose-5-phosphate from (d) and/or (f) to glycolaldehyde and D-glyceraldehyde-3-phosphate;

wherein the recombinant microorganism optionally further comprises a deletion, insertion, or loss of function mutation in a gene encoding a 6-phosphofructokinase;
wherein the one or more pentose and/or hexose sugars are capable of being converted to one or more intermediate in the non-oxidative pentose phosphate pathway of the recombinant microorganism,
wherein the acetyl-CoA produced in step (b) can be used to produce one or more co-products selected from glycolic acid, acetone, isopropanol, propene, isobutene, and one or more serine pathway compounds;
and wherein glycolaldehyde and D-glyceraldehyde 3-phosphate (G3P) are produced.

[0724] In some embodiments, the oxidative branch of the pentose phosphate pathway is deleted or inactivated to optimize flux of sugars towards the non-oxidative entry into the pentose phosphate pathway.

[0725] [D] Therefore, in one embodiment, the recombinant microorganism of embodiment [A], embodiment [B] or embodiment [C] optionally further comprises one or more modifications selected from the group consisting of:

[0726] (i) a deletion, insertion, or loss of function mutation in a gene encoding a glucose 6-phosphate-1-dehydrogenase that catalyzes the conversion of glucose-6-phosphate to 6-phospho-D-glucono-1,5-lactone;

[0727] (ii) a deletion, insertion, or loss of function mutation in a gene encoding a 6-phosphogluconolactonase that catalyzes the conversion of 6-phospho-D-glucono-1,5-lactone to gluconate-6-phosphate; and

[0728] (iii) a deletion, insertion, or loss of function mutation in a gene encoding a 6-phosphogluconate dehydrogenase that catalyzes the conversion of gluconate-6-phosphate to D-ribulose-5-phosphate.

[0729] In some embodiments, the enzyme having transketolase activity is encoded by an amino acid sequence having at least 70% sequence identity, having at least 80% sequence identity, or having at least 90% sequence identity to E. coli tktA. In other embodiments, the transketolase is encoded by an amino acid sequence having at least 70% sequence identity, having at least 80% sequence identity, or having at least 90% sequence identity to E. coli tktB. In some embodiments, the transketolase is E. coli tktA. In other embodiments, the transketolase is E. coli tktB.

[0730] In some embodiments, the one or more nucleic acid molecules encoding the enzyme having transketolase activity is tktA, or homolog thereof. In some embodiments, the one or more nucleic acid molecules encoding the enzyme having transketolase activity is tktB, or homolog thereof. In another embodiment, the one or more nucleic acid molecules encoding the enzyme having transketolase activity comprises an amino acid sequence selected from the group consisting of SEQ ID NOs: 148 and 150. In a further embodiment, the one or more nucleic acid molecule encoding the enzyme having transketolase activity is encoded by a nucleic acid sequence selected from the group consisting of SEQ ID NOs: 147 and 149.

[0731] In some embodiments, the enzyme having transaldolase activity is encoded by an amino acid sequence having at least 70% sequence identity, at least 80% sequence identity, or at least 90% sequence identity to talA or talB from E. coli. In some embodiments, the enzyme having transaldolase activity is talA from E. coli. In other embodiments, the enzyme having transaldolase activity is talB from E. coli. In another embodiment, the one or more nucleic acid molecules encoding the enzyme having transaldolase activity comprises an amino acid sequence selected from the group consisting of SEQ ID NOs: 152 and 154. In a further embodiment, the one or more nucleic acid molecule encoding the enzyme having transaldolase activity is encoded by a nucleic acid sequence selected from the group consisting of SEQ ID NOs: 151 and 153.

[0732] In one embodiment, the enzyme having ribose-5-phosphate isomerase activity is encoded by an amino acid sequence having at least 70% sequence identity, having at least 80% sequence identity, or having at least 90% sequence identity to E. coli rpiA or rpiB. In some embodiments, the enzyme having ribose-5-phosphate isomerase activity is E. coli rpiA. In some embodiments, the enzyme having ribose-5-phosphate isomerase activity is E. coli rpiB.

[0733] In some embodiments, the one or more nucleic acid molecules encoding the enzyme having ribose-5-phosphate isomerase activity is rpiA, or homolog thereof. In another embodiment, the one or more nucleic acid molecules encoding an enzyme having ribose-5-phosphate isomerase activity comprise an amino acid sequence set forth in SEQ ID NO: 156. In a further embodiment, the one or more nucleic acid molecules encoding an enzyme having ribose-5-phosphate isomerase activity is encoded by a nucleic acid sequence set forth in SEQ ID NO: 155. In some embodiments, the one or more nucleic acid molecules encoding the enzyme having ribose-5-phosphate isomerase activity is rpiB, or homolog thereof. In another embodiment, the one or more nucleic acid molecules encoding an enzyme having ribose-5-phosphate isomerase activity comprise an amino acid sequence set forth in SEQ ID NO: 254. In a further embodiment, the one or more nucleic acid molecules encoding an enzyme having ribose-5-phosphate isomerase activity is encoded by a nucleic acid sequence set forth in SEQ ID NO: 253.

[0734] In one embodiment, the enzyme having ribulose-5-phosphate 3-epimerase activity is encoded by an amino acid sequence having at least 70% sequence identity, having at least 80% sequence identity, or having at least 90% sequence identity to E. coli rpe. In some embodiments, the enzyme having ribulose-5-phosphate 3-epimerase activity is E. coli rpe.

[0735] In some embodiments, the one or more nucleic acid molecules encoding the enzyme having ribulose-5-phosphate 3-epimerase activity is rpe, or homolog thereof. In another embodiment, the one or more nucleic acid molecules encoding the enzyme having ribulose-5-phosphate 3-epimerase activity comprise an amino acid sequence set forth in SEQ ID NO: 158. In a further embodiment, the one or more nucleic acid molecule encoding the enzyme having ribulose-5-phosphate 3-epimerase activity is encoded by a nucleic acid sequence set forth in SEQ ID NO: 157.

[0736] In one embodiment, the enzyme having fructose-6-phosphate phosphoketolase activity is encoded by an amino acid sequence having at least 70% sequence identity, at least 80% sequence identity, or at least 90% sequence identity to an enzyme having fructose-6-phosphate phosphoketolase activity selected from the group consisting of Bifidobacterium dentium BDP_1006, Bifidobacterium lactis xfp, Lactobacillus paraplantarum xpkA and Bifidobacterium breve xfp. In other embodiments, the enzyme having fructose-6-phosphate phosphoketolase activity is selected from the group consisting of Bifidobacterium dentium BDP_1006, Bifidobacterium lactis xfp, Lactobacillus paraplantarum xpkA and Bifidobacterium breve xfp.

[0737] In some embodiments, the one or more nucleic acid molecules encoding the enzyme having fructose-6-phosphate phosphoketolase activity is selected from BDP_1006, xfp, xpkA, or homolog thereof. In another embodiment, the one or more nucleic acid molecules encoding the enzyme having fructose-6-phosphate phosphoketolase activity comprise an amino acid sequence selected from the group consisting of SEQ ID NOs: 212, 214, 216 and 218. In a further embodiment, the one or more nucleic acid molecule encoding the enzyme having fructose-6-phosphate phosphoketolase activity is encoded by a nucleic acid sequence selected from the group consisting of SEQ ID NOs: 211, 213, 215 and 217.

[0738] In one embodiment, the enzyme having phosphate acetyltransferase activity is encoded by an amino acid sequence having at least 70% sequence identity, at least 80% sequence identity, or at least 90% sequence identity to an enzyme having phosphate acetyltransferase activity selected from E. coli pta and Clostridium acetobutylicum pta. In other embodiments, the enzyme having phosphate acetyltransferase activity is selected from E. coli pta and Clostridium acetobutylicum pta.

[0739] In some embodiments, the one or more nucleic acid molecules encoding the enzyme having phosphate acetyltransferase activity is pta, or homolog thereof. In another embodiment, the one or more nucleic acid molecules encoding the enzyme having phosphate acetyltransferase activity comprise an amino acid sequence selected from SEQ ID NOs: 220 and 222. In a further embodiment, the one or more nucleic acid molecule encoding the enzyme having phosphate acetyltransferase activity is encoded by a nucleic acid sequence selected from SEQ ID NOs: 219 and 221.

[0740] In some embodiments, the enzyme having pentose-phosphate aldolase activity, including D-ribose-5-phosphate aldolase activity, D-ribulose-5-phosphate aldolase activity, or D-xylulose-5-phosphate aldolase activity, is encoded by an amino acid sequence having at least 70% sequence identity, at least 80% sequence identity, or at least 90% sequence identity to deoC from E. coli. In other embodiments, the enzyme having D-ribose-5-phosphate aldolase activity is deoC from E. coli.

[0741] In some embodiments, the recombinant microorganism comprises an endogenous or exogenous enzyme having xylose isomerase activity that catalyzes the conversion of D-xylose to D-xylulose. In one embodiment, the enzyme having xylose isomerase activity is exogenous. In another embodiment, the enzyme having xylose isomerase activity is encoded by one or more nucleic acid molecules obtained from Pyromyces sp. In a further embodiment, the enzyme having xylose isomerase activity is encoded by one or more nucleic acid molecules obtained from E. coli. In another embodiment, the one or more nucleic acid molecules encoding the enzyme having xylose isomerase activity is xylA, or homolog thereof. In yet another embodiment, the one or more nucleic acid molecules encoding the enzyme having xylose isomerase activity comprises an amino acid sequence selected from SEQ ID NOs: 95 and 144. In a further embodiment, the one or more nucleic acid molecules encoding the enzyme having xylose isomerase activity comprises a nucleic acid sequence selected from the group consisting of SEQ ID NOs: 93, 94 and 143.

[0742] In some embodiments, the enzyme having xylulose 5-kinase activity is encoded by an amino acid sequence having at least 70% sequence identity, at least 80% sequence identity, or at least 90% sequence identity to xylB from E. coli. In a preferred embodiment, an enzyme having xylulose 5-kinase activity is E. coli xylB. In another embodiment, the one or more nucleic acid molecules encoding the D-xylulose 5-kinase comprises an amino acid sequence set forth in SEQ ID NO: 146. In a further embodiment, the one or more nucleic acid molecules encoding the D-xylulose 5-kinase is encoded by a nucleic acid sequence set forth in SEQ ID NO: 145.

[0743] In one embodiment, the enzyme having fructose 1,6-bisphosphatase activity is encoded by an amino acid sequence having at least 70% sequence identity, at least 80% sequence identity, or at least 90% sequence identity to fbp from E. coli. In a preferred embodiment, an enzyme having fructose 1,6-bisphosphatase activity is E. coli fbp. In some embodiments, the enzyme having fructose 1,6-bisphosphatase activity converts D-fructose 1,6-bisphosphate to D-fructose 6-phosphate. In other embodiments, D-fructose is converted to fructose 1,6-bisphoshate by endogenous enzymes in the recombinant microorganism.

[0744] MEG or Glycolic Acid, or MEG and Co-Product Production Pathways

[0745] In some embodiments, the glycolaldehyde and glyceraldehyde-3-phosphate intermediates produced from embodiment [A], from embodiment [B] or from embodiment [C] (and optionally comprising embodiment [D]) are used in known MEG (or glycolic acid) C2 production pathways, which are coupled to C3 pathways, as described below, to co-produce additional MEG (or glycolic acid) and/or one or more co-products.

[0746] In some embodiments, MEG is produced via a C2 pathway that uses an enzyme having glycolaldehyde reductase activity to convert glycolaldehyde to MEG. In another embodiment, glycolic acid (GA) is produced via a C2 pathway that uses an enzyme having glycolaldehyde dehydrogenase activity to oxidize glycolaldehyde to GA.

[0747] [E] In one embodiment, the application relates to a recombinant microorganism capable of producing monoethylene glycol (MEG) from one or more pentose and/or hexose sugars, wherein the recombinant microorganism from embodiment [A], from embodiment [B], or from embodiment [C] (and optionally comprising embodiment [D]), further expresses: at least one endogenous or exogenous nucleic acid molecule encoding an enzyme having glycolaldehyde reductase activity that catalyzes the conversion of glycolaldehyde to MEG, wherein the recombinant microorganism optionally further comprises a deletion, insertion, or loss of function mutation in a gene encoding a glycolaldehyde dehydrogenase, and wherein MEG is produced.

[0748] [F] In one embodiment, the application relates to a recombinant microorganism capable of producing glycolic acid (GA) from one or more pentose and/or hexose sugars, wherein the recombinant microorganism from embodiment [A], from embodiment [B], or from embodiment [C] (and optionally comprising embodiment [D]), further expresses: at least one endogenous or exogenous nucleic acid molecule encoding an enzyme having glycolaldehyde dehydrogenase activity that catalyzes the conversion of glycolaldehyde to GA, wherein the recombinant microorganism optionally further comprises a deletion, insertion, or loss of function mutation in a gene encoding a glycolaldehyde reductase, and wherein GA is produced.

[0749] In some embodiments, the enzyme having glycolaldehyde reductase activity is encoded by one or more nucleic acid molecules obtained from a microorganism selected from E. coli and S. cerevisiae. In another embodiment, the one or more nucleic acid molecules is selected from gldA, GRE2, GRE3, yqhD, ydjG, fucO, yafB (dkgB), and/or yqhE (dkgA), or homolog thereof. In another embodiment, the one or more nucleic acid molecules is yqhD. In some embodiments, the yqhD comprises a G149E mutation. In a further embodiment, the enzyme having glycolaldehyde reductase activity comprises an amino acid sequence selected from the group consisting of SEQ ID NOs: 13, 15, 17, 20, 23, 25, 28, 30 and 32. In yet a further embodiment, the enzyme having glycolaldehyde reductase activity is encoded by a nucleic acid sequence selected from the group consisting of SEQ ID NOs: 12, 14, 16, 18, 19, 21, 22, 24, 26, 27, 29 and 31.

[0750] In one embodiment, the enzyme having glycolaldehyde dehydrogenase activity is encoded by an amino acid sequence having at least 70% sequence identity, at least 80% sequence identity, or at least 90% sequence identity to aldA from E. coli (SEQ ID NO: 289). In a preferred embodiment, an enzyme having glycolaldehyde dehydrogenase activity is E. coli aldA.

[0751] Production of MEG (or Glycolic Acid) Via a C2 Pathway and MEG (or Glycolic Acid) Via a C3 Pathway

[0752] In one aspect, MEG (or glycolic acid) is produced from one or more pentose and/or hexose sugars by the lossless transformation of the one or more pentose and/or hexose sugars to D-ribose-5-phosphate intermediate, followed by a conversion of the pentose-phosphate intermediate to glycolaldehyde and G3P intermediates, followed by a conversion of the glycolaldehyde intermediate to MEG (or glycolic acid) via a C2 pathway, and a conversion of G3P to MEG (or glycolic acid) via a C3 pathway. Wherein the the pentose-phosphate intermediate is D-ribose-5-phosphate, D-ribulose-5-phosphate or D-xylulose-5-phosphate.

[0753] In some embodiments, the application relates to a recombinant microorganism capable of producing MEG (or glycolic acid) from one or more pentose and/or hexose sugars, wherein the recombinant microorganism from embodiment [A], from embodiment [B] or from embodiment [C] (and optionally comprising embodiment [D]), and having additionally embodiment [E] or embodiment [F] for production of MEG (or glycolic acid) in a C2 pathway, further comprises one or more C3 biosynthesis pathway for the production of MEG (or glycolic acid). The C3 biosynthesis pathways for the production of MEG are, for example, as described in WO 2010/076324 (Metabolic Explorer), herein incorporated by reference in its entirety.

[0754] In some embodiments, the C3 biosynthesis pathway for the production of MEG comprises three enzymatic reactions starting with transformation of the 3-phosphohydroxypyruvate precursor (precursor for serine). First, a phosphatase activity allows conversion of phosphohydroxypyruvate into hydroxypyruvate. Hydroxypyruvate is then transformed into glycolaldehyde with a 2-keto acid decarboxylase activity. Finally, a hydroxy aldehyde reductase activity allows the conversion of glycolaldehyde into ethylene glycol. Another pathway for the production of ethylene glycol starts from L-serine as precursor. First a transaminase or an amino acid oxidase activity allows conversion of serine into hydroxypyruvate. The next two steps to convert hydroxypyruvate into glycolaldehyde and then to MEG are similar to the first pathway described above.

[0755] In a preferred embodiment, the disclosure provides for a recombinant microorganism comprising one or more C3 biosynthesis pathways for production of MEG. In some embodiments, the recombinant microorganism, particularly a bacterium, contains at least one gene encoding a polypeptide with 2-keto acid decarboxylase activity and one gene encoding a polypeptide with hydroxy aldehyde reductase activity. These genes can be exogenous or endogenous, and can be expressed chromosomally or extrachromosomally.

[0756] In a further embodiment of the disclosure, the recombinant microorganism, particularly a bacterium, comprises modifications in which the availability of the intermediate 3-phosphoglycerate is increased. Preferably, the increase is achieved by attenuating the level of expression of genes encoding phosphoglycerate mutases, in particular one or both genes gpmA and pgmI. This can be done by replacing the wild-type promoter of these genes by a weaker promoter, or by the use of an element destabilizing the corresponding messenger RNA or the protein. If needed, complete attenuation of the genes can also be achieved by the deletion of the corresponding DNA sequences.

[0757] In another embodiment, the recombinant microorganism, particularly a bacterium, comprises modifications in which flux into the serine biosynthesis pathway is stimulated. This can be achieved by increasing the level of expression of 3-phosphoglycerate dehydrogenase and/or phosphoserine aminotransferase, encoded by the serA and serC genes, respectively. Increasing the level of expression of the 3-phosphoglycerate dehydrogenase and/or phosphoserine aminotransferase can be accomplished by introducing artificial promoters that drive the expression of the serA and/or serC genes, by increasing the number of copies in the cell or by introducing mutations into the serA and/or serC genes that increase the activity of the corresponding proteins. The expression of the serA gene can also be increased by replacing the wild type Irp gene (encoding the leucine-responsive regulatory protein) by an Irp mutated allele (such as the Irp-1 allele corresponding to a GLU 114 ASP substitution in the Irp protein) leading to the constitutive activation of the transcription of the serA gene.

[0758] In a particular embodiment of the disclosure mutations can be introduced into the serA gene that reduce the sensitivity of the SerA protein to the feed-back inhibitor serine (feed-back desensitized alleles) and thus permit an increased activity in the presence of serine. Examples of desensitized alleles, i.e. feed-back insensitive alleles, have been described in EP 0 931 833 (Ajinomoto) or EP 0 620 853 (Wacker).

[0759] In another embodiment, the recombinant microorganism, particularly a bacterium, comprises modifications in which flux into the hydroxypyruvate biosynthesis pathway is stimulated. This result can be achieved by increasing the level of expression of serine transaminase or serine oxidase (for the pathway starting from serine as precursor), or by increasing the expression of 3-phosphohydroxypyruvate phosphatase. Increasing the level of expression of serine oxidase can be accomplished by introducing and overexpressing the gene coding for L-amino acid oxidase from R. opacus, or by introducing mutations into the gene that increase the activity of the corresponding protein. An increase in the expression of serine transaminase can be accomplished by introducing artificial promoters that drive the expression of the serC gene of E. coli, by increasing the number of copies in the cell or by introducing mutations into the serC gene that increase the activity of the corresponding protein. An increase of the expression of 3-phosphohydroxypyruvate phosphatase can be accomplished by introducing artificial promoters that drive the expression of the yeaB gene or serB gene of E. coli, by increasing the number of copies in the cell or by introducing mutations into the yeaB gene or the serB gene that increase the activity of the corresponding proteins. An increase of the expression of 3-phosphohydroxypyruvate phosphatase can also be accomplished by introducing and overexpressing the gene GPP2 from S. cerevisiae, or by introducing mutations into the GPP2 gene that increase the activity of the corresponding protein.

[0760] In a further embodiment of the disclosure, the recombinant microorganism, particularly a bacterium, comprises modifications to present an attenuated level of glycolaldehyde conversion to other compounds than ethylene glycol This may be achieved by attenuating the level of glycolaldehyde consuming enzymes like hydroxythreonine aldolase (encoded by UaE) or glycolaldehyde dehydrogenase (encoded by aldA, aldB). Attenuation of these genes can be done by replacing the natural promoter by a lower strength promoter or by elements destabilizing the corresponding messenger RNA or the protein. If needed, complete attenuation of the gene can also be achieved by a deletion of the corresponding DNA sequence.

[0761] In a further embodiment of the disclosure, the efficiency of sugar import is increased, either by using a sugar import system not relying on phosphoenolpyruvate (PEP) as phosphordonor like galP that is known to transport glucose, or by providing more phosphoenolpyruvate (PEP) to the sugar-phosphotransferase system. Various means exist that may be used to increase the availability of PEP in a microorganism. In particular, this can be accomplished by attenuating the reaction PEP→pyruvate. Preferentially, at least one gene selected among pykA and pykF, encoding pyruvate kinase, is attenuated in said strain in order to obtain this result. Another way to increase the availability of PEP is to favour the reaction pyruvate→PEP. This can be accomplished by increasing the activity of phosphoenolpyruvate synthase which catalyzes the above reaction. This enzyme is encoded by the ppsA gene. Therefore, in the microorganism, the expression of the ppsA gene is preferentially increased. Both modifications can be present in the microorganism simultaneously.

[0762] In a further embodiment of the disclosure, the recombinant microorganism, particularly a bacterium, comprises modifications to present an attenuated level of serine conversion to other compounds than ethylene glycol. This result may be achieved by attenuating the level of serine consuming enzymes like serine deaminases (encoded by sdaA, sdaB and/or tdcG), serine transacetylase (encoded by cysE), tryptophan synthase (encoded by trpAB) or serine hydroxymethyltransferase (encoded by glyA). These genes can be attenuated by replacing the natural promoter by a lower strength promoter or by elements destabilizing the corresponding messenger RNA or the protein. If needed, complete attenuation of the gene can also be achieved by a deletion of the corresponding DNA sequence.

[0763] In a further embodiment of the disclosure, the recombinant microorganism, particularly a bacterium, comprises modifications to present an attenuated level of hydroxypyruvate conversion to other compounds than glycolaldehyde. This result may be achieved by attenuating the level of hydroxypyruvate consuming enzymes like hydroxypyruvate reductase (encoded by ghrA) or hydroxypyruvate isomerase (encoded by hyi). These genes can be attenuated by replacing the natural promoter by a lower strength promoter or by elements destabilizing the corresponding messenger RNA or the protein. If needed, complete attenuation of the gene can also be achieved by a deletion of the corresponding DNA sequence.

[0764] In some embodiments, the application relates to a recombinant microorganism capable of producing MEG (or glycolic acid) from one or more pentose and/or hexose sugars, wherein the recombinant microorganism from embodiment [A], from embodiment [B], or from embodiment [C] (and optionally comprising embodiment [D]), and having additionally embodiment [E] or embodiment [F] for production of MEG (or glycolic acid) in a C2 pathway, further comprises one or more C3 biosynthesis pathway for the production of MEG (or glycolic acid). The C3 biosynthesis pathways for the production of MEG are, for example, as described in as described in WO 2011/130378 (Genomatica), herein incorporated by reference in its entirety.

[0765] In some embodiments, the disclosure provides a recombinant microorganism comprising an ethylene glycol pathway having at least one exogenous nucleic acid encoding an ethylene glycol pathway enzyme expressed in a sufficient amount to produce ethylene glycol, the ethylene glycol pathway including a serine aminotransferase, a serine oxidoreductase (deaminating), a hydroxypyruvate decarboxylase, a glycolaldehyde reductase, a serine decarboxylase, an ethanolamine aminotransferase, an ethanolamine oxidoreductase (deaminating), a hydroxypyruvate reductase or a glycerate decarboxylase.

[0766] In some embodiments, the recombinant microorganism comprises an ethylene glycol pathway having at least one exogenous nucleic acid encoding ethylene glycol pathway enzymes expressed in a sufficient amount to produce ethylene glycol, the ethylene glycol pathway including a serine aminotransferase or a serine oxidoreductase (deaminating); a hydroxypyruvate decarboxylase, and a glycolaldehyde reductase.

[0767] In some embodiments, the recombinant microorganism comprises an ethylene glycol pathway having at least one exogenous nucleic acid encoding ethylene glycol pathway enzymes expressed in a sufficient amount to produce ethylene glycol, the ethylene glycol pathway including a serine aminotransferase or a serine oxidoreductase (deaminating); a hydroxypyruvate reductase, and a glycerate decarboxylase.

[0768] In some embodiments, the recombinant microorganism comprises an ethylene glycol pathway having at least one exogenous nucleic acid encoding ethylene glycol pathway enzymes expressed in a sufficient amount to produce ethylene glycol, the ethylene glycol pathway including a serine decarboxylase; an ethanolamine aminotransferase or an ethanolamine oxidoreductase (deaminating), and a glycolaldehyde reductase.

[0769] In some embodiments, the disclosure provides a recombinant microorganism comprising an ethylene glycol pathway having at least one exogenous nucleic acid encoding an ethylene glycol pathway enzyme expressed in a sufficient amount to produce ethylene glycol, the ethylene glycol pathway including a hydroxypyruvate decarboxylase, glycolaldehyde reductase, a hydroxypyruvate reductase, a glycerate decarboxylase, a 3-phosphoglycerate phosphatase, and a glycerate kinase.

[0770] In some embodiments, the recombinant microorganism comprises an ethylene glycol pathway having at least one exogenous nucleic acid encoding ethylene glycol pathway enzymes expressed in a sufficient amount to produce ethylene glycol, the ethylene glycol pathway including a hydroxypyruvate reductase; a hydroxypyruvate decarboxylase, and a glycolaldehyde reductase.

[0771] In some embodiments, the recombinant microorganism comprises an ethylene glycol pathway having at least one exogenous nucleic acid encoding ethylene glycol pathway enzymes expressed in a sufficient amount to produce ethylene glycol, the ethylene glycol pathway including a 3-phosphoglycerate phosphatase or a glycerate kinase; a hydroxypyruvate reductase; a hydroxypyruvate decarboxylase, and a glycolaldehyde reductase.

[0772] In some embodiments, the recombinant microorganism comprises an ethylene glycol pathway having at least one exogenous nucleic acid encoding an ethylene glycol pathway enzyme expressed in a sufficient amount to produce ethylene glycol, the ethylene glycol pathway including a glycerate decarboxylase.

[0773] In some embodiments, the recombinant microorganism comprises an ethylene glycol pathway having at least one exogenous nucleic acid encoding ethylene glycol pathway enzymes expressed in a sufficient amount to produce ethylene glycol, the ethylene glycol pathway including a 3-phosphoglycerate phosphatase or a glycerate kinase and a glycerate decarboxylase.

[0774] In some embodiments, the disclosure provides a recombinant microorganism comprising an ethylene glycol pathway, wherein the recombinant microorganism comprises at least one exogenous nucleic acid encoding an enzyme or protein that converts a substrate to a product selected from the group consisting of serine to hydroxypyruvate, hydroxypyruvate to glycolaldehyde, glycolaldehyde to ethylene glycol, serine to ethanolamine, ethanolamine to glycolaldehyde, 3-phosphoglycerate to glycerate, glycerate to hydroxypyruvate, hydroxypyruvate to glycerate, and glycerate to ethylene glycol. One skilled in the art will understand that these are merely exemplary and that any of the substrate-product pairs disclosed herein suitable to produce a desired product and for which an appropriate activity is available for the conversion of the substrate to the product can be readily determined by one skilled in the art based on the teachings herein. Thus, the disclosure provides a recombinant microorganism containing at least one exogenous nucleic acid encoding an enzyme or protein, where the enzyme or protein converts the substrates and products of an ethylene glycol pathway.

[0775] While generally described herein as a recombinant microorganism that contains an ethylene glycol pathway, it is understood that the disclosure additionally provides a recombinant microorganism comprising at least one exogenous nucleic acid encoding an ethylene glycol pathway enzyme expressed in a sufficient amount to produce an intermediate of an ethylene glycol pathway. Therefore, in addition to a recombinant microorganism containing an ethylene glycol pathway that produces ethylene glycol, the disclosure additionally provides a recombinant microorganism comprising at least one exogenous nucleic acid encoding an ethylene glycol pathway enzyme, where the microbial organism produces an ethylene glycol pathway intermediate, for example, hydroxypyruvate, ethanolamine, glycolaldehyde, or glycerate.

[0776] In some embodiments, a serine aminotransferase or serine oxidoreductase (deaminating) catalyzes the conversion of serine to hydroxypyruvate. In some embodiments, a hydroxypyruvate decarboxylase catalyzes the conversion of hydroxypyruvate to glycolaldehyde. In some embodiments, a glycolaldehyde reductase catalyzes the conversion of glycolaldehyde to ethylene glycol. In some embodiments, a serine decarboxylase catalyzes the conversion of serine to ethanolamine. In some embodiments, an ethanolamine aminotransferase or ethanolamine oxidoreductase (deaminating) catalyzes the conversion of ethanolamine to glycolaldehyde. In some embodiments, a hydroxypyruvate reductase catalyzes the conversion of glycerate to hydroxypyruvate. In some embodiments, a glycerate decarboxylase catalyzes the conversion of glycerate to ethylene glycol. In some embodiments, a 3-phosphoglycerate phosphatase or glycerate kinase catalyzes the conversion of 3-phosphoglycerate to glycerate.

[0777] In some embodiments, MEG (or glycolic acid) is produced from the lossless transformation of one or more pentose and/or hexose sugars to D-ribose-5-phosphate intermediate, followed by a conversion of the D-ribose-5-phosphate intermediate to glycolaldehyde and G3P intermediates, followed by a conversion of the glycolaldehyde intermediate to MEG (or glycolic acid) via a C2 pathway, and a conversion of the G3P intermediate to MEG (or glycolic acid) via a C3 pathway.

[0778] [K] In one embodiment, the application relates to a recombinant microorganism capable of producing monoethylene glycol (MEG) (or glycolic acid) from one or more pentose and/or hexose sugars and a nitrogen source, wherein the recombinant microorganism from embodiment [A], or from embodiment [B], or from embodiment [C] (and optionally comprising embodiment [D]), and having additionally embodiment [E] or embodiment [F] for production of MEG (or glycolic acid) in a C2 pathway, further expresses one or more of the following from (a) to (h):

[0779] (a) at least one endogenous or exogenous nucleic acid molecule encoding an enzyme having 3-phosphoglycerate dehydrogenase activity that catalyzes the conversion of 3-phosphoglycerate to 3-phosphohydroxypyruvate;

[0780] (b) at least one endogenous or exogenous nucleic acid molecule encoding an enzyme having phosphoserine aminotransferase activity that catalyzes the conversion of 3-phosphohydroxypyruvate from (a) to phospho-L-serine;

[0781] (c) at least one endogenous or exogenous nucleic acid molecule encoding an enzyme having 3-phosphohydroxypyruvate phosphatase activity that catalyzes the conversion of 3-phosphohydroxypyruvate from (a) to hydroxypyruvate;

[0782] (d) at least one endogenous or exogenous nucleic acid molecule encoding an enzyme having phosphoserine phosphatase activity that catalyzes the conversion of phospho-L-serine from (b) to L-serine;

[0783] (e) at least one endogenous or exogenous nucleic acid molecule encoding an enzyme having L-serine transaminase or serine oxidase activity that catalyzes the conversion of L-serine from (d) to hydroxypyruvate;

[0784] (f) at least one endogenous or exogenous nucleic acid molecule encoding an enzyme having hydroxypyruvate decarboxylase activity that catalyzes the conversion of hydroxypyruvate from (c) or (e) to glycolaldehyde;

[0785] (g) at least one endogenous or exogenous nucleic acid molecule encoding an enzyme having glycolaldehyde reductase activity that catalyzes the conversion of glycolaldehyde from (f) to MEG;

[0786] (h) at least one endogenous or exogenous nucleic acid molecule encoding an enzyme having glycolaldehyde dehydrogenase activity that catalyzes the conversion of glycolaldehyde from (f) to glycolic acid;

wherein the produced intermediate G3P from embodiment [A], from embodiment [B], or from embodiment [C] is converted to 3-phosphoglycerate through endogenous glycolysis in the recombinant microorganism, and wherein MEG (or glycolic acid) is produced.

[0787] [L] In one embodiment, the application relates to a recombinant microorganism capable of producing monoethylene glycol (MEG) (or glycolic acid) from one or more pentose and/or hexose sugars and a nitrogen source, wherein the recombinant microorganism from embodiment [A], from embodiment [B], or from embodiment [C] (and optionally comprising embodiment [D]), and having additionally embodiment [E] or embodiment [F] for production of MEG (or glycolic acid) in a C2 pathway, further expresses one or more of the following from (a) to (j):

[0788] (a) at least one endogenous or exogenous nucleic acid molecule encoding an enzyme having 2-phosphoglycerate phosphatase activity and/or an enzyme having glycerate-2-kinase activity that catalyzes the conversion of 2-phosphoglycerate to glycerate;

[0789] (b) at least one endogenous or exogenous nucleic acid molecule encoding an enzyme having 3-phosphoglycerate phosphatase activity or an enzyme having glycerate-3-kinase activity that catalyzes the conversion of 3-phosphoglycerate to glycerate;

[0790] (c) at least one endogenous or exogenous nucleic acid molecule encoding an enzyme having hydroxypyruvate reductase activity that catalyzes the conversion of glycerate from (a) and/or (b) to hydroxypyruvate;

[0791] (d) at least one endogenous or exogenous nucleic acid molecule encoding an enzyme having serine aminotransferase activity or an enzyme having serine oxidoreductase (deaminating) activity that catalyzes the conversion of L-serine to hydroxypyruvate;

[0792] (e) at least one endogenous or exogenous nucleic acid molecule encoding an enzyme having L-serine decarboxylase activity that catalyzes the conversion of L-serine to ethanolamine;

[0793] (f) at least one endogenous or exogenous nucleic acid molecule encoding an enzyme having hydroxypyruvate decarboxylase activity that catalyzes the conversion of hydroxypyruvate from (c) and/or (d) to glycolaldehyde;

[0794] (g) at least one endogenous or exogenous nucleic acid molecule encoding an enzyme having ethanolamine aminotransferase or ethanolamine oidoreductase (deaminating) activity that catalyzes the conversion of ethanolamine from (e) to glycolaldehyde;

[0795] (h) at least one endogenous or exogenous nucleic acid molecule encoding an enzyme having glycerate decarboxylase activity that catalyzes the conversion of glycerate from (a) and/or (b) to MEG;

[0796] (i) at least one endogenous or exogenous nucleic acid molecule encoding an enzyme having glycolaldehyde reductase activity that catalyzes the conversion of glycolaldehyde from (f) and/or (g) to MEG;

[0797] (j) at least one endogenous or exogenous nucleic acid molecule encoding an enzyme having glycolaldehyde dehydrogenase activity that catalyzes the conversion of glycolaldehyde from (f) and/or (g) to glycolic acid;

wherein the produced intermediate G3P from embodiment [A], from embodiment [B], or from embodiment [C] is converted to 3-phosphoglycerate and/or 2-phosphoglycerate through endogenous glycolysis in the recombinant microorganism, and wherein MEG (or glycolic acid) is produced.

[0798] In some embodiments, a 2-keto acid decarboxylase, a hydroxypyruvate decarboxylase or a 2-oxoglutarate decarboxylase converts hydroxypyruvate to glycolaldehyde. In some embodiments, the enzyme that converts hydroxypyruvate to glycolaldehyde is encoded by an amino acid sequence having at least 70% sequence identity, having at least 80% sequence identity, or having at least 90% sequence identity to Kivd, dxs, or SucA. In some embodiments, the 2-keto acid decarboxylase is Kivd from Lactococcus lactis. In yet another embodiment, the one or more nucleic acid molecules encoding the 2-keto acid decarboxylase comprises an amino acid sequence set forth in SEQ ID NO: 224. In a further embodiment, the one or more nucleic acid molecules encoding the 2-keto acid decarboxylase comprises by a nucleic acid sequence set forth in SEQ ID NO: 223. In some embodiments, the 2-oxoglutarate decarboxylase is SucA from E. coli. In yet another embodiment, the one or more nucleic acid molecules encoding the 2-oxoglutarate decarboxylase comprises an amino acid sequence set forth in SEQ ID NO: 226. In a further embodiment, the one or more nucleic acid molecules encoding the 2-oxoglutarate decarboxylase comprises a nucleic acid sequence set forth in SEQ ID NO: 225.

[0799] In some embodiments, the hydroxy aldehyde reductase can be a glycolaldehyde reductase. In some embodiments, the enzyme having glycolaldehyde reductase activity is encoded by an amino acid sequence having at least 70% sequence identity, having at least 80% sequence identity, or having at least 90% sequence identity to yqhD or FucO. In some embodiments, the enzyme having glycolaldehyde reductase activity is encoded by one or more nucleic acid molecules obtained from a microorganism selected from E. coli and S. cerevisiae. In another embodiment, the one or more nucleic acid molecules is selected from gldA, GRE2, GRE3, yqhD, ydjG, fucO, yafB (dkgB), and/or yqhE (dkgA), or homolog thereof. In another embodiment, the one or more nucleic acid molecules is yqhD. In some embodiments, the yqhD comprises a G149E mutation. In a further embodiment, the enzyme having glycolaldehyde reductase activity comprises an amino acid sequence selected from the group consisting of SEQ ID NOs: 13, 15, 17, 20, 23, 25, 28, 30 and 32. In yet a further embodiment, the enzyme having glycolaldehyde reductase activity is encoded by a nucleic acid sequence selected from the group consisting of SEQ ID NOs: 12, 14, 16, 18, 19, 21, 22, 24, 26, 27, 29 and 31.

[0800] In some embodiments, the 3-phosphoglycerate dehydrogenase can be a 3-phospho-hydroxypyruvate reductase or a 2-oxoglutarate reductase. In some embodiments, the enzyme having 3-phospho-hydroxypyruvate reductase activity is encoded by an amino acid sequence having at least 70% sequence identity, having at least 80% sequence identity, or having at least 90% sequence identity to serA. In some embodiments, the enzyme having 3-phospho-hydroxypyruvate reductase activity is serA from E. coli. In yet another embodiment, the one or more nucleic acid molecules encoding the enzyme having 3-phospho-hydroxypyruvate reductase activity comprises an amino acid sequence set forth in SEQ ID NO: 228. In a further embodiment, the one or more nucleic acid molecules encoding the enzyme having 3-phospho-hydroxypyruvate reductase activity comprises a nucleic acid sequence set forth in SEQ ID NO: 227.

[0801] In some embodiments, the 3-phosphoserine aminotransferase can be an L-serine transaminase, a serine aminotransferase or a serine-pyruvate aminotransferase. In some embodiments, the enzyme having 3-phosphoserine aminotransferase activity is encoded by an amino acid sequence having at least 70% sequence identity, having at least 80% sequence identity, or having at least 90% sequence identity to serC. In some embodiments, the enzyme having 3-phosphoserine aminotransferase activity is serC from E. coli. In yet another embodiment, the one or more nucleic acid molecules encoding the enzyme having 3-phosphoserine aminotransferase activity comprises an amino acid sequence set forth in SEQ ID NO: 230. In a further embodiment, the one or more nucleic acid molecules encoding the enzyme having 3-phosphoserine aminotransferase activity comprises a nucleic acid sequence set forth in SEQ ID NO: 229.

[0802] In some embodiments, the enzyme having serine-pyruvate aminotransferase activity is AGXT1 from Homo sapiens. In yet another embodiment, the one or more nucleic acid molecules encoding the enzyme having serine-pyruvate aminotransferase activity comprises an amino acid sequence set forth in SEQ ID NO: 244. In a further embodiment, the one or more nucleic acid molecules encoding the enzyme having serine-pyruvate aminotransferase activity comprises a nucleic acid sequence set forth in SEQ ID NO: 243.

[0803] In some embodiments, the enzyme having 3-phospho-hydroxypyruvate phosphatase activity is encoded by an amino acid sequence having at least 70% sequence identity, having at least 80% sequence identity, or having at least 90% sequence identity to yeaB (nudL). In some embodiments, the enzyme having 3-phospho-hydroxypyruvate phosphatase activity is yeaB (nudL) from E. coli. In yet another embodiment, the one or more nucleic acid molecules encoding the enzyme having 3-phospho-hydroxypyruvate phosphatase activity comprises an amino acid sequence set forth in SEQ ID NO: 232. In a further embodiment, the one or more nucleic acid molecules encoding the enzyme having 3-phospho-hydroxypyruvate phosphatase activity comprises a nucleic acid sequence set forth in SEQ ID NO: 231.

[0804] In some embodiments, the enzyme having phosphoserine phosphatase activity is encoded by an amino acid sequence having at least 70% sequence identity, having at least 80% sequence identity, or having at least 90% sequence identity to serB. In some embodiments, the enzyme having phosphoserine phosphatase activity is serB from E. coli. In yet another embodiment, the one or more nucleic acid molecules encoding the enzyme having phosphoserine phosphatase activity comprises an amino acid sequence set forth in SEQ ID NO: 234. In a further embodiment, the one or more nucleic acid molecules encoding the enzyme having phosphoserine phosphatase activity comprises a nucleic acid sequence set forth in SEQ ID NO: 233.

[0805] In some embodiments, an enzyme having 2-phosphoglycerate phosphatase activity or an enzyme having glycerate-2-kinase activity converts 2-phosphoglycerate to glycerate. In some embodiments, the enzyme that converts 2-phosphoglycerate to glycerate is encoded by an amino acid sequence having at least 70% sequence identity, having at least 80% sequence identity, or having at least 90% sequence identity to phoA, glxK or garK. In some embodiments, the enzyme having 2-phosphoglycerate phosphatase activity is phoA from E. coli. In yet another embodiment, the one or more nucleic acid molecules encoding the enzyme having 2-phosphoglycerate phosphatase activity comprises an amino acid sequence set forth in SEQ ID NO: 246. In a further embodiment, the one or more nucleic acid molecules encoding the enzyme having 2-phosphoglycerate phosphatase activity comprises a nucleic acid sequence set forth in SEQ ID NO: 245. In some embodiments, the enzyme having glycerate-2-kinase activity is glxK from E. coli. In yet another embodiment, the one or more nucleic acid molecules encoding the enzyme having glycerate-2-kinase activity comprises an amino acid sequence set forth in SEQ ID NO: 250. In a further embodiment, the one or more nucleic acid molecules encoding the enzyme having glycerate-2-kinase activity comprises a nucleic acid sequence set forth in SEQ ID NO: 249. In some embodiments, the enzyme having glycerate-2-kinase activity is garK from E. coli. In yet another embodiment, the one or more nucleic acid molecules encoding the enzyme having glycerate-2-kinase activity comprises an amino acid sequence set forth in SEQ ID NO: 252. In a further embodiment, the one or more nucleic acid molecules encoding the enzyme having glycerate-2-kinase activity comprises a nucleic acid sequence set forth in SEQ ID NO: 251.

[0806] In some embodiments, an enzyme having 3-phosphoglycerate phosphatase activity or an enzyme having glycerate-3-kinase activity converts 3-phosphoglycerate to glycerate. In some embodiments, the enzyme that converts 3-phosphoglycerate to glycerate is encoded by an amino acid sequence having at least 70% sequence identity, having at least 80% sequence identity, or having at least 90% sequence identity to phoA or GLYK. In some embodiments, the enzyme having 3-phosphoglycerate phosphatase activity is phoA from E. coli. In yet another embodiment, the one or more nucleic acid molecules encoding the enzyme having 3-phosphoglycerate phosphatase activity comprises an amino acid sequence set forth in SEQ ID NO: 246. In a further embodiment, the one or more nucleic acid molecules encoding the enzyme having 3-phosphoglycerate phosphatase activity comprises a nucleic acid sequence set forth in SEQ ID NO: 245. In some embodiments, the enzyme having glycerate-3-kinase activity is GLYK from Arabidopsis thaliana. In yet another embodiment, the one or more nucleic acid molecules encoding the enzyme having glycerate-3-kinase activity comprises an amino acid sequence set forth in SEQ ID NO: 248. In a further embodiment, the one or more nucleic acid molecules encoding the enzyme having glycerate-3-kinase activity comprises a nucleic acid sequence set forth in SEQ ID NO: 247.

[0807] In some embodiments, an enzyme having hydroxypyruvate reductase activity converts glycerate to hydroxypyruvate. In some embodiments, the enzyme that converts glycerate to hydroxypyruvate is encoded by an amino acid sequence having at least 70% sequence identity, having at least 80% sequence identity, or having at least 90% sequence identity to ghrB. In some embodiments, the enzyme having hydroxypyruvate reductase activity is ghrB from E. coli. In yet another embodiment, the one or more nucleic acid molecules encoding the enzyme hydroxypyruvate reductase activity comprises an amino acid sequence set forth in SEQ ID NO: 242. In a further embodiment, the one or more nucleic acid molecules encoding the enzyme hydroxypyruvate reductase activity comprises a nucleic acid sequence set forth in SEQ ID NO: 241.

[0808] In some embodiments, an enzyme having serine decarboxylase activity converts L-serine to ethanolamine. In some embodiments, the enzyme that converts L-serine to ethanolamine is encoded by an amino acid sequence having at least 70% sequence identity, having at least 80% sequence identity, or having at least 90% sequence identity to SDC. In some embodiments, the enzyme having serine decarboxylase activity is SDC from Arabidopsis thaliana. In yet another embodiment, the one or more nucleic acid molecules encoding the enzyme having serine decarboxylase activity comprises an amino acid sequence set forth in SEQ ID NO: 236. In a further embodiment, the one or more nucleic acid molecules encoding the enzyme having serine decarboxylase activity comprises a nucleic acid sequence set forth in SEQ ID NO: 235.

[0809] In some embodiments, an enzyme having ethanolamine aminotransferase activity or an enzyme having ethanolamine oxidoreductase (deaminating) activity converts ethanolamine to glycolaldehyde. In some embodiments, the enzyme that converts ethanolamine to glycolaldehyde is encoded by an amino acid sequence having at least 70% sequence identity, having at least 80% sequence identity, or having at least 90% sequence identity to alaA or tynA. In some embodiments, the enzyme having ethanolamine aminotransferase activity is alaA from E. coli. In yet another embodiment, the one or more nucleic acid molecules encoding the enzyme having ethanolamine aminotransferase activity comprises an amino acid sequence set forth in SEQ ID NO: 240. In a further embodiment, the one or more nucleic acid molecules encoding the enzyme having ethanolamine aminotransferase activity comprises a nucleic acid sequence set forth in SEQ ID NO: 239. In some embodiments, the enzyme having ethanolamine oxidoreductase (deaminating) activity is tynA from E. coli. In yet another embodiment, the one or more nucleic acid molecules encoding the enzyme having ethanolamine oxidoreductase (deaminating) activity comprises an amino acid sequence set forth in SEQ ID NO: 238. In a further embodiment, the one or more nucleic acid molecules encoding the enzyme having ethanolamine oxidoreductase (deaminating) activity comprises a nucleic acid sequence set forth in SEQ ID NO: 237.

[0810] In another aspect, MEG is produced from the lossless transformation of one or more pentose and/or hexose sugars to D-ribose-5-phosphate intermediate, followed by a conversion of the D-ribose-5-phosphate intermediate to glycolaldehyde and D-glyceraldehyde-3-phosphate (G3P) intermediates, followed by a conversion of the glycolaldehyde intermediate to MEG via a C2 pathway, and a conversion of G3P intermediate to one or more co-product via a C3 pathway.

[0811] Co-Production of MEG Via a C2 Pathway and Acetone, Isopropanol, Propene and/or Isobutene Via a C3 Pathway

[0812] In some embodiments, MEG is produced from the lossless transformation of one or more pentose and/or hexose sugars to D-ribose-5-phosphate intermediate, followed by a conversion of the D-ribose-5-phosphate intermediate to glycolaldehyde and D-glyceraldehyde-3-phosphate (G3P) intermediates, followed by a conversion of the glycolaldehyde intermediate to MEG via a C2 pathway, and a conversion of G3P intermediate to acetone via a C3 pathway.

[0813] [M] In one embodiment, the application relates to a recombinant microorganism capable of co-producing monoethylene glycol (MEG) and acetone from one or more pentose and/or hexose sugars, wherein the recombinant microorganism from embodiment [A], from embodiment [B], or from embodiment [C](and optionally comprising embodiment [D]), and having additionally embodiment [E] for production of MEG in a C2 pathway, further expresses one or more of the following from (a) to (c):

[0814] (a) at least one endogenous or exogenous nucleic acid molecule encoding an enzyme having thiolase or acetyl coenzyme A acetyltransferase activity that catalyzes the conversion of acetyl-CoA to acetoacetyl-CoA;

[0815] (b) at least one endogenous or exogenous nucleic acid molecule encoding an enzyme having acetyl-CoA:acetoacetate-CoA transferase activity or an enzyme having acetate:acetoacetyl-CoA hydrolase activity that catalyzes the conversion of acetoacetyl-CoA from (a) to acetoacetate; and/or

[0816] (c) at least one endogenous or exogenous nucleic acid molecule encoding an enzyme having acetoacetate decarboxylase activity that catalyzes the conversion of acetoacetate from (b) to acetone;

wherein the produced intermediate G3P from embodiment [A] or from embodiment [B] is converted to acetyl-CoA through endogenous glycolysis in the microorganism, and wherein MEG (or glycolic acid) and acetone are co-produced.

[0817] In some embodiments, MEG is produced from the lossless transformation of one or more pentose and/or hexose sugars to D-ribose-5-phosphate intermediate, followed by a conversion of the D-ribose-5-phosphate intermediate to glycolaldehyde and D-glyceraldehyde-3-phosphate (G3P) intermediates, followed by a conversion of the glycolaldehyde intermediate to MEG via a C2 pathway, and a conversion of G3P intermediate to isobutene via a C3 pathway.

[0818] [N] In some embodiments, the application relates to a recombinant microorganism capable of co-producing monoethylene glycol (MEG) and isobutene from one or more pentose and/or hexose sugars, wherein the recombinant microorganism from embodiment [A], from embodiment [B], or from embodiment [C](and optionally comprising embodiment [D]), and having additionally embodiment [E] for production of MEG in a C2 pathway, further expresses one or more of the following from (a) to (d):

[0819] (a) at least one endogenous or exogenous nucleic acid molecule encoding an enzyme having thiolase or acetyl coenzyme A acetyltransferase activity that catalyzes the conversion of acetyl-CoA to acetoacetyl-CoA;

[0820] (b) at least one endogenous or exogenous nucleic acid molecule encoding an enzyme having acetyl-CoA:acetoacetate-CoA transferase activity or an enzyme having acetate:acetoacetyl-CoA hydrolase activity that catalyzes the conversion of acetoacetyl-CoA from (a) to acetoacetate;

[0821] (c) at least one endogenous or exogenous nucleic acid molecule encoding an enzyme having acetoacetate decarboxylase activity that catalyzes the conversion of acetoacetate from (b) to acetone;

[0822] (d) at least one endogenous or exogenous nucleic acid molecule encoding an enzyme having 3-hydroxyisovalerate synthase activity that catalyzes the conversion of acetone from (c) and acetyl-CoA to 3-hydroxyisovalerate (3HIV);

[0823] or

wherein the recombinant microorganism expresses one or more of the following from (e) to (j):

[0824] (e) at least one endogenous or exogenous nucleic acid molecule encoding an enzyme having thiolase or acetyl coenzyme A acetyltransferase activity that catalyzes the conversion of acetyl-CoA to acetoacetyl-CoA;

[0825] (f) at least one endogenous or exogenous nucleic acid molecule encoding an enzyme having hydroxymethylglutaryl-CoA synthase activity that catalyzes the conversion of acetoacetyl-CoA from (e) and acetyl-CoA to 3-hydroxy-3-methylglutaryl-CoA (HMG-CoA);

[0826] (g) at least one endogenous or exogenous nucleic acid molecule encoding an enzyme having methylglutaconyl-CoA hydratase activity that catalyzes the conversion of HMG-CoA from (f) to 3-methylglutaconyl-CoA;

[0827] (h) at least one endogenous or exogenous nucleic acid molecule encoding an enzyme having methylcrotonyl-CoA carboxylase activity that catalyzes the conversion of 3-methylglutaconyl-CoA from (g) to 3-methylcrotonyl-CoA;

[0828] (i) at least one endogenous or exogenous nucleic acid molecule encoding an enzyme having methylcrotonyl-CoA hydratase activity that catalyzes the conversion of 3-methylcrotonyl-CoA from (h) to 3-hydroxyisovaleryl-CoA;

[0829] (j) at least one endogenous or exogenous nucleic acid molecule encoding an enzyme having 3-hydroxyisovaleryl-CoA thioesterase activity that catalyzes the conversion of 3-hydroxyisovaleryl-CoA from (i) to 3HIV;

wherein the recombinant microorganism further expresses (a1) and (a2), and/or (b1) selected from:

[0830] (a1) at least one endogenous or exogenous nucleic acid molecule encoding an enzyme having 3HIV kinase activity that catalyzes the conversion of 3HIV from (d) or (j) to 3HIV-3-phosphate;

[0831] (a2) at least one endogenous or exogenous nucleic acid molecule encoding an enzyme having 3HIV-3-phosphate decarboxylase activity that catalyzes the conversion of 3HIV-3-phosphate from (a1) to isobutene;

[0832] (b1) at least one endogenous or exogenous nucleic acid molecule encoding a an enzyme having 3HIV decarboxylase activity that catalyzes the conversion of 3HIV from (d) or (j) to isobutene;

wherein the produced intermediate G3P from embodiment [A], from embodiment [B], or from embodiment [C] is converted to acetyl-CoA through endogenous glycolysis in the microorganism, and wherein MEG and isobutene are co-produced.

[0833] In some embodiments, MEG is produced from the lossless transformation of one or more pentose and/or hexose sugars to D-ribose-5-phosphate intermediate, followed by a conversion of the D-ribose-5-phosphate intermediate to glycolaldehyde and D-glyceraldehyde-3-phosphate (G3P) intermediates, followed by a conversion of the glycolaldehyde intermediate to MEG via a C2 pathway, and a conversion of G3P intermediate to isopropanol via a C3 pathway.

[0834] [O] In one embodiment, the recombinant microorganisms from embodiment [M] and/or [N] (optionally comprising embodiment [EE]), optionally further express at least one endogenous or exogenous nucleic acid molecule encoding an enzyme having secondary alcohol dehydrogenase activity that catalyzes the conversion of acetone to isopropanol.

[0835] In some embodiments, the alcohol dehydrogenase has at least 70% sequence identity, at least 80% sequence identity, or at least 90% sequence identity with an alcohol dehydrogenase from Clostridium sp. In other embodiments, the alcohol dehydrogenase is an alcohol dehydrogenase selected from Clostridium beijerinckii adh and Clostridium carboxidivorans adh. In a further embodiment, the alcohol dehydrogenase comprises an amino acid sequence selected from the group consisting of SEQ ID NOs: 138 and 140. In yet another embodiment, the alcohol dehydrogenase is encoded by a nucleic acid sequence selected from the group consisting of SEQ ID NOs: 136, 137, and 139.

[0836] In some embodiments, MEG is produced from the lossless transformation of one or more pentose and/or hexose sugars to D-ribose-5-phosphate intermediate, followed by a conversion of the D-ribose-5-phosphate intermediate to glycolaldehyde and D-glyceraldehyde-3-phosphate (G3P) intermediates, followed by a conversion of the glycolaldehyde intermediate to MEG via a C2 pathway, and a conversion of G3P intermediate to propene via a C3 pathway.

[0837] [P] In another embodiment, the recombinant microorganisms from embodiment [O] (optionally comprising embodiment [EE]), optionally further comprises at least one endogenous or exogenous nucleic acid molecule encoding an enzyme having dehydratase activity that catalyzes the conversion of isopropanol to propene.

[0838] In one embodiment of any pathway disclosed above for isobutene co-production, the enzyme having 3-hydroxyisovalerate synthase activity is encoded by one or more nucleic acid molecules obtained from a microorganism selected from Mus sp., Saccharomyces sp., Lactobacillus sp. and Polaromonas sp. In another embodiment, the enzyme having 3-hydroxyisovalerate synthase activity is encoded by one or more nucleic acid molecules obtained from a microorganism selected from Mus musculus, Saccharomyces cerevisiae, Lactobacillus crispatus and Polaromonas naphthalenivorans. In some embodiments, the one or more nucleic acid molecules encoding the enzyme having 3-hydroxyisovalerate synthase activity is selected from Hmgcs1, ERG13, PksG and/or Pnap_0477, or homolog thereof. In a further embodiment, the one or more nucleic acid molecules encoding the enzyme having 3-hydroxyisovalerate synthase activity comprises an amino acid sequence selected from the group consisting of SEQ ID NOs: 105, 107, 109 and 111. In yet another embodiment, the one or more nucleic acid molecules encoding the enzyme having 3-hydroxyisovalerate synthase activity comprises a nucleic acid sequence selected from the group consisting of SEQ ID NOs: 104, 106, 108 and 110.

[0839] In one embodiment of any pathway disclosed above for isobutene co-production, the enzyme having hydroxymethylglutaryl-CoA synthase activity is encoded by one or more nucleic acid molecules obtained from Saccharomyces sp. In another embodiment, the enzyme having hydroxymethylglutaryl-CoA synthase activity is encoded by one or more nucleic acid molecules obtained from Saccharomyces cerevisiae. In some embodiments, the one or more nucleic acid molecules encoding the enzyme having hydroxymethylglutaryl-CoA synthase activity is HmgS, or homolog thereof. In a further embodiment, the one or more nucleic acid molecules encoding the enzyme having hydroxymethylglutaryl-CoA synthase activity comprises an amino acid sequence set forth in SEQ ID NO: 123. In yet another embodiment, the one or more nucleic acid molecules encoding the enzyme having hydroxymethylglutaryl-CoA synthase activity comprises a nucleic acid sequence set forth in SEQ ID NO: 122.

[0840] In one embodiment of any pathway disclosed above for isobutene co-production, the enzyme having methylglutaconyl-CoA hydratase activity is encoded by one or more nucleic acid molecules obtained from Pseudomonas sp. In another embodiment, the enzyme having methylglutaconyl-CoA hydratase activity is encoded by one or more nucleic acid molecules obtained from Pseudomonas putida. In some embodiments, the one or more nucleic acid molecules encoding the enzyme having methylglutaconyl-CoA hydratase activity is liuC, or homolog thereof. In a further embodiment, the one or more nucleic acid molecules encoding the enzyme having methylglutaconyl-CoA hydratase activity comprises an amino acid sequence set forth in SEQ ID NO: 125. In yet another embodiment, the one or more nucleic acid molecules encoding the enzyme having methylglutaconyl-CoA hydratase activity comprises a nucleic acid sequence set forth in SEQ ID NO: 124.

[0841] In one embodiment of any pathway disclosed above for isobutene co-production, the enzyme having methylcrotonyl-CoA carboxylase activity is encoded by one or more nucleic acid molecules obtained from Pseudomonas sp. In another embodiment, the enzyme having methylcrotonyl-CoA carboxylase activity is encoded by one or more nucleic acid molecules obtained from Pseudomonas aeruginosa. In some embodiments, the one or more nucleic acid molecules encoding the enzyme having methylcrotonyl-CoA carboxylase activity is liuB, and/or liuD, or homologs thereof. In a further embodiment, the one or more nucleic acid molecules encoding the enzyme having methylcrotonyl-CoA carboxylase activity comprises an amino acid sequence selected from SEQ ID NOs: 127 and 129. In yet another embodiment, the one or more nucleic acid molecules encoding the enzyme having methylcrotonyl-CoA carboxylase activity comprises a nucleic acid sequence selected from SEQ ID NOs: 126 and 128.

[0842] In one embodiment of any pathway disclosed above for isobutene co-production, the enzyme having methylcrotonyl-CoA hydratase activity is a 3-ketoacyl-CoA thiolase. In another embodiment, the enzyme having methylcrotonyl-CoA hydratase activity is an enoyl-CoA hydratase. In another embodiment, the enzyme having methylcrotonyl-CoA hydratase activity is encoded by one or more nucleic acid molecules obtained from E. coli. In some embodiments, the one or more nucleic acid molecules encoding the enzyme having methylcrotonyl-CoA hydratase activity is fadA, and/or fadB, or homologs thereof. In a further embodiment, the one or more nucleic acid molecules encoding the enzyme having methylcrotonyl-CoA hydratase activity comprises an amino acid sequence selected from SEQ ID NOs: 131 and 133. In yet another embodiment, the one or more nucleic acid molecules encoding the enzyme having methylcrotonyl-CoA hydratase activity comprises a nucleic acid sequence selected from SEQ ID NOs: 130 and 132.

[0843] In one embodiment of any pathway disclosed above for isobutene co-production, the enzyme having 3-hydroxyisovaleryl-CoA thioesterase activity is encoded by one or more nucleic acid molecules obtained from E. coli. In some embodiments, the one or more nucleic acid molecules encoding the enzyme having 3-hydroxyisovaleryl-CoA thioesterase activity is tesB, or homolog thereof. In a further embodiment, the one or more nucleic acid molecules encoding the enzyme having 3-hydroxyisovaleryl-CoA thioesterase activity comprises an amino acid sequence set forth in SEQ ID NO: 135. In yet another embodiment, the one or more nucleic acid molecules encoding the enzyme having 3-hydroxyisovaleryl-CoA thioesterase activity comprises a nucleic acid sequence set forth in SEQ ID NO: 134.

[0844] In one embodiment of any pathway disclosed above for isobutene co-production, the enzyme having 3HIV kinase activity is encoded by one or more nucleic acid molecules obtained from a microorganism selected from the group consisting of Thermoplasma sp. and Picrophilus sp. In another embodiment, the enzyme having 3HIV kinase activity is encoded by one or more nucleic acid molecules obtained from a microorganism selected from the group consisting of Thermoplasma acidophilum and Picrophilus torridus. In some embodiments, the one or more nucleic acid molecules encoding the enzyme having 3HIV kinase activity is TA1305 and/or PTO1356, or homolog thereof. In some embodiments, the TA1305 comprises a L200E mutation. In a further embodiment, the one or more nucleic acid molecules encoding the enzyme having 3HIV kinase activity comprises an amino acid sequence selected from the group consisting of SEQ ID NOs: 113, 115 and 117. In yet another embodiment, the one or more nucleic acid molecules encoding the enzyme having 3HIV kinase activity comprises a nucleic acid sequence selected from the group consisting of SEQ ID NOs: 112, 114 and 116.

[0845] In one embodiment of any pathway disclosed above for isobutene co-production, the enzyme having 3HIV-3-phosphate decarboxylase activity is encoded by one or more nucleic acid molecules obtained from Streptococcus sp. In another embodiment, the enzyme having 3HIV-3-phosphate decarboxylase activity is encoded by one or more nucleic acid molecules obtained from a microorganism selected from Streptococcus mitis and Streptococcus gordonii. In some embodiments, the one or more nucleic acid molecules encoding the enzyme having 3HIV-3-phosphate decarboxylase activity comprises smi_1746 and/or mvaD, or homolog thereof. In a further embodiment, the one or more nucleic acid molecules encoding the enzyme having 3HIV-3-phosphate decarboxylase activity comprises an amino acid sequence selected from SEQ ID NOs: 119 and 121. In yet another embodiment, the one or more nucleic acid molecules encoding the enzyme having 3HIV-3-phosphate decarboxylase activity comprises a nucleic acid sequence selected from SEQ ID NOs: 118 and 120.

[0846] In one embodiment of any pathway disclosed above for isobutene co-production, the enzyme having 3HIV decarboxylase activity is encoded by one or more nucleic acid molecules obtained from a microorganism selected from the group consisting of Streptococcus sp., Thermoplasma sp. and Picrophilus sp. In another embodiment, the enzyme having 3HIV decarboxylase activity is encoded by one or more nucleic acid molecules obtained from a microorganism selected from the group consisting of Streptococcus gordonii, Thermoplasma acidophilum and Picrophilus torridus. In some embodiments, the one or more nucleic acid molecules encoding the enzyme having 3HIV decarboxylase activity comprises mvaD, TA1305 and/or PTO1356, or homolog thereof. In a further embodiment, the one or more nucleic acid molecules encoding the enzyme having 3HIV decarboxylase activity comprises an amino acid sequence selected from the group consisting of SEQ ID NOs: 113, 117 and 121. In yet another embodiment, the one or more nucleic acid molecules encoding the enzyme having 3HIV decarboxylase activity comprises a nucleic acid sequence selected from the group consisting of SEQ ID NOs: 112, 116 and 120.

[0847] Co-Production of MEG Via a C2 Pathway and One or More Serine Pathway Compound Via a C3 Pathway

[0848] In some embodiments, the production of MEG via a C2 pathway is coupled to the production of one or more serine pathway compound via a C3 pathway. In one embodiment, one or more serine pathway compound relates to the L-serine biosynthetic pathway. In another embodiment, the one or more serine pathway compound is L-serine (Ser), glycine (Gly), monoethanolamine (MEA), and/or ethylenediamine (EDA) (FIG. 6).

[0849] Production of Monoethylene glycol (MEG) or glycolic acid via a C2 pathway

[0850] As discussed above, all currently known MEG (or glycolic acid) production methods using glucose as feedstock have low yield potential. This is an intrinsic drawback of the biochemistry of how glucose is degraded to MEG, with one decarboxylation occurring per produced MEG (or glycolic acid) molecule for all the proposed and known pathways. However, one decarboxylation per MEG is too much to achieve redox-neutral and therefore optimal yield.

[0851] To produce MEG in the present disclosure, one or more pentose and/or hexose sugars are converted to a pentose-phosphate intermediate via a non-oxidative entry into the pentose phosphate pathway in a manner that preserves yield potential, as described above. The pentose-phosphate intermediate, wherein the pentose-phosphate intermediate is D-ribose-5-phosphate, D-ribulose-5-phosphate or D-xylulose-5-phosphate, is then converted to glycolaldehyde and G3P via an enzyme having pentose-phosphate aldolase activity, wherein the aldolase has D-ribose-5-phosphate aldolase activity, D-ribulose-5-phosphate aldolase activity, or D-xylulose-5-phosphate aldolase activity. The glycolaldehyde intermediate is reduced to MEG, consuming an NADH. Alternatively, glycolaldehyde can be oxidized by a glycolaldehyde dehydrogenase to glycolic acid. The C3 compound G3P is further oxidized to one or more of the L-serine pathway compounds Ser, Gly, MEA, or EDA, producing NADH.

[0852] To reduce ATP requirements and optimize yield potential, D-xylose is preferably imported by a H+/xylose symporter, such as XylE from E. coli, or a passive, energy independent facilitator, rather than an active ABC-type transporter such as XylFGH from E. coli, which utilizes 1 ATP per transported molecule. While a symporter does not directly consume ATP, its degradation of the proton gradient is equivalent to utilization of around 0.1 ATP. In all following equations, this indirect ATP consumption as well as ATP required for cell maintenance are not accounted for.

[0853] Ammonia (NH₃)

[0854] Ammonia is a compound of nitrogen and hydrogen with the formula NH₃, which serves as a precursor to food and fertilizers as well as a building block for the synthesis of pharmaceutical products and commercial cleaning products. Ammonia is present as an ammonium cation when it is positively charged, whose chemical formula is NH₄⁺.

[0855] The present disclosure teaches that ammonia or a similar compound is utilized as nitrogen source. When ammonia or a similar compound is used as a nitrogen source, it is fixed into organic matter, for example, glutamate. In one embodiment, when 2-oxoglutarate is usually formed into glutamate, the ammonia is fixed and this process consumes one NADH.

[0856] Production of L-Serine (Ser)

[0857] Ser is produced by the natural pathway via 3-phosphoserine or a variation thereof. In one embodiment, G3P produced from the conversion of D-ribose 5-phosphate by a D-ribose 5-phosphate aldolase is converted by endogenous glycolysis in the microorganism to 3-phospho-D-glycerate (3-phosphoglycerate). 3-phosphoglycerate is converted to 3-phosphohydroxypyruvate by a D-3-phosphoglycerate dehydrogenase (EC 1.1.1.95). The 3-phosphohydroxypyruvate is then converted to 3-phosphoserine by a 3-phosphoserine aminotransferase (EC 2.6.1.52). The 3-phosphoserine is then converted to L-serine by a phosphoserine phosphatase (EC 3.1.3.3).

[0858] In some embodiments the reaction from 3-phosphoglycerate to L-serine is the following:

3-phospho-D-glycerate+NAD⁺+L-glutamate+H₂O→L-serine+NADH+2-oxoglutarate+phosphate

[0859] Considering the production of two NADH from G3P to 3-phosphohydroxypyruvate and one NADH required for fixation of NH₃, Ser production produces exactly one excess NADH, which is needed for the equimolar co-production of one MEG (or glycolic acid).

[0860] In some embodiments, the production of MEG and L-serine is very close to the thermodynamic maximum yield potential using the lossless conversion of one or more pentose and/or hexose sugars a pentose-phosphate intermediate, followed by the conversion of the D-ribose-5-phosphate intermediate to glycolaldehyde and D-glyceraldehyde-3-phosphate (G3P) intermediates, and then followed by the co-production of MEG via reduction of glycolaldehyde and L-serine via one or more C3 pathways from the G3P intermediate. In some embodiments, the thermodynamic yield potential is 14% better for co-production of MEG and L-serine via the pathways disclosed in the present application compared to production of L-serine made from glucose by the natural, standard C3 pathway.

[0861] Co-production: (pentose or hexose)+NH₃→MEG+Ser+0 ATP*

[0862] Y(pathway)=(0.371+0.629) g/g=1.00 g (MEG+Ser)/g((pentose or hexose)+NH₃), 96% of Y(max)(heat of combustion)=1.044 g/g

[0863] Standard pathway: glucose+2 NH₃→2 Ser+2 NADH+0 ATP

[0864] Y(pathway)=0.981 g (Ser)/g((pentose or hexose)+2NH₃), 84% of Y(max)(heat of combustion)=1.164 g/g

[0865] *Passive or H⁺ symport transport of D-xylose, a pentose, is assumed. Indirect ATP consumption for a H⁺ symporter or ATP required for cell maintenance are not accounted for.

[0866] In some embodiments, MEG and L-serine are co-produced from the lossless transformation of one or more pentose and/or hexose sugars to pentose-phosphate intermediate, followed by a conversion of the pentose-phosphate intermediate to glycolaldehyde and D-glyceraldehyde-3-phosphate (G3P) intermediates, followed by a conversion of the glycolaldehyde intermediate to MEG via a C2 pathway, and a conversion of G3P intermediate to Lserine via one or more C3 pathways.

[0867] [Q] In one embodiment, the application relates to a recombinant microorganism capable of co-producing monoethylene glycol (MEG) and L-serine from one or more pentose and/or hexose sugars and a nitrogen source, wherein the recombinant microorganism from embodiment [A], from embodiment [B], or from embodiment [C] (and optionally comprising embodiment [D]), and having additionally embodiment [E] for production of MEG in a C2 pathway, further expresses one or more of the following from (a) to (h):

[0868] (a) at least one endogenous or exogenous nucleic acid molecule encoding an enzyme having 3-phosphoglycerate dehydrogenase activity that catalyzes the conversion of 3-phosphoglycerate to 3-phosphohydroxypyruvate;

[0869] (b) at least one endogenous or exogenous nucleic acid molecule encoding an enzyme having 3-phosphoglycerate phosphatase activity and/or an enzyme having glycerate 3-kinase activity that catalyzes the conversion of 3-phosphoglycerate to glycerate;

[0870] (c) at least one endogenous or exogenous nucleic acid molecule encoding an enzyme having 2-phosphoglycerate phosphatase activity and/or an enzyme having glycerate 2-kinase activity that catalyzes the conversion of 2-phosphoglycerate to glycerate;

[0871] (d) at least one endogenous or exogenous nucleic acid molecule encoding an enzyme having phosphoserine aminotransferase activity that catalyzes the conversion of 3-phosphohydroxypyruvate from (a) to phospho-L-serine;

[0872] (e) at least one endogenous or exogenous nucleic acid molecule encoding an enzyme having 3-phosphohydroxypyruvate phosphatase activity that catalyzes the conversion of 3-phosphohydroxypyruvate from (a) to hydroxypyruvate;

[0873] (f) at least one endogenous or exogenous nucleic acid molecule encoding an enzyme having phosphoserine phosphatase activity that catalyzes the conversion of phospho-L-serine from (d) to L-serine;

[0874] (g) at least one endogenous or exogenous nucleic acid molecule encoding an enzyme having hydroxypyruvate reductase activity that catalyzes the conversion of glycerate from (b) and/or (c) to hydroxypyruvate;

[0875] (h) at least one endogenous or exogenous nucleic acid molecule encoding an enzyme having serine-pyruvate aminotransferase activity that catalyzes the conversion of hydroxypyruvate from (e) and/or (g) to L-serine;

wherein the produced intermediate G3P from embodiment [A], from embodiment [B], or from embodiment [C] is converted to 3-phosphoglycerate and/or 2-phosphoglycerate through endogenous glycolysis in the microorganism, and wherein MEG and L-serine are produced.

[0876] Production of Glycine (Gly)

[0877] Gly is produced by natural pathways, for instance via Ser, or variations thereof.

[0878] In one embodiment, Gly is produced via a Ser based pathway. In the Ser based pathway, 5,10-methylene tetrahydrofolate (M-THF) is produced from THF and L-serine is converted to glycine by a serine hydroxymethyltransferase. M-THF is utilized in the biosynthesis of various cellular compounds, for instance in methylation reactions.

[0879] In a preferred embodiment, M-THF can also be used to produce two more NADH or one NADH and one H₂:

[0880] M-THF+H₂O↔THF+formaldehyde (EC 2.1.2.-; transferases such as hydroxymethyl-, formyl- and related transferases that transfers one-carbon group), subsequent oxidation of formaldehyde (EC 1.2.1.46; formaldehyde dehydrogenase) to formate and NADH, and further oxidation of formate to CO₂ and NADH (formate dehydrogenase, FDH) or CO₂ and H₂ (formate hydrogenlyase complex).

[0881] In some embodiments, this reconstitution of THF, if done partially, can be used to generate just enough NADH to perform another, distinct glycine biosynthesis route. In one embodiment, the route via the glycine cleavage system, which utilizes M-THF, NH₃, CO₂ and NADH to synthesize glycine directly, can be used together with the serine based glycine production to utilize the generated excess M-THF to generate more glycine.

[0882] The glycine-cleavage system (GCV) is a multienzyme complex that catalyzes the reversible oxidation of glycine, yielding carbon dioxide, ammonia, 5,10-methylenetetrahydrofolate (M-THF) and a reduced pyridine nucleotide:

Glycine+THF+NAD⁺↔M-THF+CO₂+NH₃+NADH+H⁺

[0883] Tetrahydrofolate serves as a recipient for one-carbon units generated during glycine cleavage to form the methylene group. The GCV system consists of four protein components, the P protein, H protein, T protein, and L protein. P protein (EC 1.4.4.2, glycine dehydrogenase (decarboxylating)) catalyzes the pyridoxal phosphate-dependent liberation of CO₂ from glycine, leaving a methylamine moiety. The methylamine moiety is transferred to the lipoic acid group of the H protein, which is bound to the P protein prior to decarboxylation of glycine. The T protein (EC 2.1.2.10, aminomethyltransferase) catalyzes the release of NH₃ from the methylamine group and transfers the remaining C1 unit to THF, forming 5,10-mTHF. The L protein (EC 1.8.1.4, dihydrolipoyl dehydrogenase) then oxidizes the lipoic acid component of the H protein and transfers the electrons to NAD+, forming NADH.

[0884] The same set of enzymes is sometimes referred to as glycine synthase when it runs in the reverse direction to form glycine. In the anaerobic bacteria, Clostridium acidiurici, the glycine cleavage system runs mostly in the direction of glycine synthesis.

[0885] Alternatively, in another embodiment, glycine can also be produced via transamination of glyoxylate by alanine-glyoxylate aminotransferase (EC 2.6.1.44). Though in organisms like Saccharomyces cerevisiae, this pathway is only expressed during growth on non-fermentable carbon sources like ethanol or acetate, this pathway can be readily overexpressed in any microorganism. The amino group donor alanine gets reconstituted by transamination with glutamate (alanine transaminase, EC 2.6.1.2), which in turn gets reconstituted by fixation of ammonia by a NADH or NADPH dependent glutamate dehydrogenase (EC 1.4.1.2 or EC 1.4.1.3). In one embodiment, this glycine pathway avoids the intermediate L-serine and does not lead to the production of M-THF, but rather directly produces two reducing equivalents such as NADH.

[0886] In some embodiments, the production of MEG and glycine is very close to the thermodynamic maximum yield potential using the lossless conversion of one or more pentose and/or hexose sugars to D-ribose-5-phosphate intermediate, followed by the conversion of the D-ribose-5-phosphate intermediate to glycolaldehyde and D-glyceraldehyde-3-phosphate (G3P) intermediates, and then followed by the co-production of MEG via reduction of glycolaldehyde and glycine via one or more C3 pathways from the G3P intermediate. In some embodiments, the thermodynamic yield potential is 37% better for co-production of MEG (or glycolic acid) and glycine via the pathways disclosed in the present application compared to production of glycine made from glucose by the natural, standard C3 pathway.

[0887] Co-production, serine pathway: (pentose or hexose)+NH₃+THF->MEG+Gly+M-THF+0 ATP*

[0888] Co-production, serine pathway, assuming THF reconstitution via formate and using FDH:

[0889] (pentose or hexose)+NH₃->MEG+Gly+2 NADH+0 ATP*

[0890] Co-production, glyoxylate pathway: (pentose or hexose)+NH₃->MEG+Gly+2 NAD(P)H+0 ATP*

[0891] Y(pathway)=(0.371+0.449) g/g=0.820 g(MEG+Gly)/g((pentose or hexose)+NH₃), 81% of Y(max)(heat of combustion)=1.013 g/g

[0892] Co-production, serine pathway, assuming partial THF reconstitution via formate and FDH plus glycine synthesis via glycine cleavage system:

[0893] Partial THF reconstitution through NADH production: M-THF->2/3 M-THF+1/3 THF+2/3 NADH

[0894] Utilization of remaining M-THF and generated NADH for glycine cleavage system:

[0895] 2/3 M-THF+2/3 NADH+2/3 NH₃+2/3 CO₂->2/3 Gly

[0896] (pentose or hexose)+5/3 NH₃+2/3 CO₂->MEG+5/3 Gly+0 ATP*

[0897] y(pathway)=(0.348+0.698) g/g=1.046 g/g, 97% of y(max)=1.076 g/g

[0898] Standard pathway: glucose+2 NH₃+2 THF->2 Gly+2 M-THF+2 NADH+0 ATP

[0899] Y(pathway)=0.701 g(Gly)/g(glucose+2NH3), 59% of Y(max)(heat of combustion)=1.197 g/g

[0900] *Passive or H+ symport transport of D-xylose, a pentose, is assumed. Indirect ATP consumption for a H+ symporter or ATP required for cell maintenance are not accounted for.

[0901] In some embodiments, MEG and glycine are co-produced from the lossless transformation of one or more pentose and/or hexose sugars to D-ribose-5-phosphate intermediate, followed by a conversion of the D-ribose-5-phosphate intermediate to glycolaldehyde and D-glyceraldehyde-3-phosphate (G3P) intermediates, followed by a conversion of the glycolaldehyde intermediate to MEG via a C2 pathway, and a conversion of G3P intermediate to glycine via one or more C3 pathways.

[0902] [R] In one embodiment, the application relates to a recombinant microorganism capable of co-producing monoethylene glycol (MEG) and glycine from one or more pentose and/or hexose sugars and a nitrogen source, wherein the recombinant microorganism from embodiment [A], from embodiment [B] or from embodiment [C] (and optionally comprising embodiment [D]), and having additionally embodiment [E] for production of MEG in a C2 pathway, further expresses one or more of the following from (a) to (e):

[0903] (a) at least one endogenous or exogenous nucleic acid molecule encoding an enzyme having serine hydroxymethyltransferase activity that catalyzes the conversion of L-serine and tetrahydrofolate (THF) to glycine and 5,10-methylene tetrahydrofolate (M-THF);

[0904] (b) at least one endogenous or exogenous nucleic acid molecule encoding an enzyme having transferase activity that catalyzes the conversion of M-THF from (a) to formaldehyde;

[0905] (c) at least one endogenous or exogenous nucleic acid molecule encoding an enzyme having formaldehyde dehydrogenase activity that catalyzes the conversion of formaldehyde from (b) to formate and NADH;

[0906] (d) at least one endogenous or exogenous nucleic acid molecule encoding an enzyme having formate dehydrogenase activity that catalyzes the conversion of formate from (c) to CO₂ and NADH;

[0907] (e) at least one endogenous or exogenous nucleic acid molecule encoding a protein of the glycine cleavage system that catalyze the conversion of M-THF from (a), CO₂, NH₃ and NADH from (c) or (d) to glycine and THF;

wherein THF is reconstituted from steps (b) through (e), wherein optionally formate from (c) is further oxidized to CO₂ and H₂ by a formate hydrogenlyase complex, and wherein MEG and glycine are produced.

[0908] [S] In one embodiment, the application relates to a recombinant microorganism capable of co-producing monoethylene glycol (MEG) and glycine from one or more pentose and/or hexose sugars and a nitrogen source, wherein the recombinant microorganism from embodiment [A], from embodiment [B], or from embodiment [C] (and optionally comprising embodiment [D]), and having additionally embodiment [E] for production of MEG in a C2 pathway, further expresses one or more of the following from (a) to (k):

[0909] (a) at least one endogenous or exogenous nucleic acid molecule encoding an enzyme having 3-phosphoglycerate dehydrogenase activity that catalyzes the conversion of 3-phosphoglycerate to 3-phosphohydroxypyruvate;

[0910] (b) at least one endogenous or exogenous nucleic acid molecule encoding an enzyme having phosphoserine aminotransferase activity that catalyzes the conversion of 3-phosphohydroxypyruvate from (a) to phospho-L-serine;

[0911] (c) at least one endogenous or exogenous nucleic acid molecule encoding an enzyme having 3-phosphohydroxypyruvate phosphatase activity that catalyzes the conversion of 3-phosphohydroxypyruvate from (a) to hydroxypyruvate;

[0912] (d) at least one endogenous or exogenous nucleic acid molecule encoding an enzyme having phosphoserine phosphatase activity that catalyzes the conversion of phospho-L-serine from (b) to L-serine;

[0913] (e) at least one endogenous or exogenous nucleic acid molecule encoding an enzyme having L-serine transaminase or serine oxidase activity that catalyzes the conversion of L-serine from (d) to hydroxypyruvate;

[0914] (f) at least one endogenous or exogenous nucleic acid molecule encoding an enzyme having hydroxypyruvate decarboxylase activity that catalyzes the conversion of hydroxypyruvate from (c) or (e) to glycolaldehyde;

[0915] (g) at least one endogenous or exogenous nucleic acid molecule encoding an enzyme having glycolaldehyde dehydrogenase activity that catalyzes the conversion of glycolaldehyde from (f) to glycolic acid;

[0916] (h) at least one endogenous or exogenous nucleic acid molecule encoding an enzyme having glycolate dehydrogenase activity that catalyzes the conversion of glycolic acid from (g) to glyoxylate;

[0917] (i) at least one endogenous or exogenous nucleic acid molecule encoding an enzyme having alanine-glyoxylate aminotransferase activity that catalyzes the conversion of glyoxylate from (h) and alanine to glycine and pyruvate;

[0918] (j) at least one endogenous or exogenous nucleic acid molecule encoding an enzyme having alanine transaminase activity that catalyzes the conversion of pyruvate from (i) and glutamate to alanine and 2-oxoglutarate;

[0919] (k) at least one endogenous or exogenous nucleic acid molecule encoding an enzyme having NAD(P)H dependent glutamate dehydrogenase activity that catalyzes the conversion of 2-oxoglutarate from (j) and ammonia to glutamate;

wherein the produced intermediate G3P from embodiment [A] or from embodiment [B] is converted to 3-phosphoglycerate and/or 2-phosphoglycerate through endogenous glycolysis in the microorganism, wherein the glyoxylate for step (i) optionally comes from glyoxylate shunt in the microorganism, wherein alanine and glutamate are reconstituted from steps (j) and (k), and wherein MEG and glycine are co-produced.

[0920] [T] In one embodiment, the application relates to a recombinant microorganism capable of co-producing monoethylene glycol (MEG) and glycine from one or more pentose and/or hexose sugars and a nitrogen source, wherein the recombinant microorganism from embodiment [A], from embodiment [B], or from embodiment [C] (and optionally comprising embodiment [D]), and having additionally embodiment [E] for production of MEG in a C2 pathway, further expresses one or more of the following from (a) to (l):

[0921] (a) at least one endogenous or exogenous nucleic acid molecule encoding an enzyme having 2-phosphoglycerate phosphatase activity and/or an enzyme having glycerate-2-kinase activity that catalyzes the conversion of 2-phosphoglycerate to glycerate;

[0922] (b) at least one endogenous or exogenous nucleic acid molecule encoding an enzyme having 3-phosphoglycerate phosphatase activity and/or an enzyme having glycerate-3-kinase activity that catalyzes the conversion of 3-phosphoglycerate to glycerate;

[0923] (c) at least one endogenous or exogenous nucleic acid molecule encoding an enzyme having hydroxypyruvate reductase activity that catalyzes the conversion of glycerate from (a) and/or (b) to hydroxypyruvate;

[0924] (d) at least one endogenous or exogenous nucleic acid molecule encoding an enzyme having serine aminotransferase or serine oxidoreductase (deaminating) activity that catalyzes the conversion of L-serine to hydroxypyruvate;

[0925] (e) at least one endogenous or exogenous nucleic acid molecule encoding an enzyme having L-serine decarboxylase activity that catalyzes the conversion of L-serine to ethanolamine;

[0926] (f) at least one endogenous or exogenous nucleic acid molecule encoding an enzyme having hydroxypyruvate decarboxylase activity that catalyzes the conversion of hydroxypyruvate from (c) and/or (d) to glycolaldehyde;

[0927] (g) at least one endogenous or exogenous nucleic acid molecule encoding an enzyme having ethanolamine aminotransferase activity or an enzyme having ethanolamine oidoreductase (deaminating) activity that catalyzes the conversion of ethanolamine from (e) to glycolaldehyde;

[0928] (h) at least one endogenous or exogenous nucleic acid molecule encoding an enzyme having glycolaldehyde dehydrogenase activity that catalyzes the conversion of glycolaldehyde from (f) and/or (g) to glycolic acid;

[0929] (i) at least one endogenous or exogenous nucleic acid molecule encoding an enzyme having glycolate dehydrogenase activity that catalyzes the conversion of glycolic acid from (g) to glyoxylate;

[0930] (j) at least one endogenous or exogenous nucleic acid molecule encoding an enzyme having alanine-glyoxylate aminotransferase activity that catalyzes the conversion of glyoxylate from (i) and alanine to glycine and pyruvate;

[0931] (k) at least one endogenous or exogenous nucleic acid molecule encoding an enzyme having alanine transaminase activity that catalyzes the conversion of pyruvate from (j) and glutamate to alanine and 2-oxoglutarate;

[0932] (l) at least one endogenous or exogenous nucleic acid molecule encoding an enzyme having NAD(P)H dependent glutamate dehydrogenase activity that catalyzes the conversion of 2-oxoglutarate from (k) and ammonia to glutamate;

wherein the produced intermediate G3P from embodiment [A]. from embodiment [B], or from embodiment [C] is converted to 3-phosphoglycerate and/or 2-phosphoglycerate through endogenous glycolysis in the microorganism, wherein the glyoxylate for step (j) optionally comes from glyoxylate shunt in the microorganism, wherein alanine and glutamate are reconstituted from steps (k) and (l), and wherein MEG and glycine are co-produced.

[0933] In some embodiments, an enzyme having serine hydroxymethyltransferase activity converts L-serine to glycine. In some embodiments, the enzyme that converts L-serine to glycine is encoded by an amino acid sequence having at least 70% sequence identity, having at least 80% sequence identity, or having at least 90% sequence identity to E. coli glyA. In some embodiments, the one or more nucleic acid molecule encoding an enzyme having serine hydroxymethyltransferase activity comprises an amino acid sequence set forth in UniProt ID P0A825. In a further embodiment, the one or more nucleic acid molecule encoding an enzyme having serine hydroxymethyltransferase activity is encoded by a nucleic acid sequence set forth in Gene ID 947022.

[0934] In some embodiments, an enzyme having transferase activity that transfers one-carbon groups is used to convert M-THF to formaldehyde. Transferases such as the hydroxymethyl-, formyl- and related transferases may be used. Examples of hydroxymethyl-, formyl- and related transferases include glycine hydroxymethyltransferase, phosphoribosylglycinamide formyltransferase, phosphoribosylaminoimidazolecarboxamide formyltransferase, glycine formimidoyltransferase, glutamate formiminotransferase, D-alanine 2-hydroxymethyltransferase, deoxycytidylate 5-hydroxymethyltransferase, methionyl-tRNA formyltransferase, aminomethyltransferase, 3-methyl-2-oxobutanoate hydroxymethyltransferase and UDP-4-amino-4-deoxy-L-arabinose formyltransferase.

[0935] In some embodiments, an enzyme having formaldehyde dehydrogenase activity is used to convert formaldehyde to formate and NADH. In some embodiments, the enzyme having formaldehyde dehydrogenase activity is encoded by an amino acid sequence having at least 70% sequence identity, having at least 80% sequence identity, or having at least 90% sequence identity to a formaldehyde dehydrogenase selected from Saccharomyces cerevisiae ALD2, Saccharomyces cerevisiae ALD3, Homo sapiens ALDH3A2, and Homo sapiens ALDH9A1. In some embodiments, the one or more nucleic acid molecule encoding an enzyme having formaldehyde dehydrogenase activity comprises an amino acid sequence selected from UniProt ID P47771, UniProt ID P54114, UniProt ID P51648 and UniProt ID P49189. In a further embodiment, the one or more nucleic acid molecule encoding an enzyme having formaldehyde dehydrogenase activity is encoded by a nucleic acid sequence selected from Gene ID 855206, Gene ID 855205, Gene ID 224 and Gene ID 223.

[0936] In some embodiments, an enzyme having formate dehydrogenase activity is used to convert formate to CO₂ and NADH. In some embodiments, the enzyme having formate dehydrogenase activity is encoded by an amino acid sequence having at least 70% sequence identity, having at least 80% sequence identity, or having at least 90% sequence identity to an enzyme having formate dehydrogenase activity selected from the group consisting of E. coli fdhF (chlF, FDH-H), E. coli FDH-N, E. coli FDH-O, Candida boidinii FDH1, Corynebacterium glutamicum fdhF, Cupriavidus oxalaticus NAD+-dependent formate dehydrogenase, Gottschalkia acidurici NAD+-dependent formate dehydrogenase, Methylobacterium extorquens Fdh1, Methylosinus trichosporium formate dehydrogenase, and Moraxella sp. NAD+-dependent formate dehydrogenase fdh. In some embodiments, the one or more nucleic acid molecule encoding an enzyme or subunit of an enzyme associated with formate dehydrogenase activity comprises an amino acid sequence selected from UniProt ID P07658, UniProt ID P0AEK7, UniProt ID P0AAJ3, UniProt ID P24183, UniProt ID P32176, UniProt ID P0AAJ5, UniProt ID P0AEL0, UniProt ID O13437, UniProt ID Q8NSY6, UniProt ID Q8KTI7, UniProt ID Q8KTI8, and UniProt ID O08375. In a further embodiment, the one or more nucleic acid molecule encoding an enzyme or subunit of an enzyme associated with formate dehydrogenase activity comprises a nucleic acid sequence selected from Gene ID 948584, Gene ID 946038, Gene ID 948794, Gene ID 946035, Gene ID 948394, Gene ID 948395, Gene ID 948383, GenBank accession AJ011046.2, Gene ID 1021531, GenBank accession AF489516, and GenBank accession Y13245.1.

[0937] In some embodiments, one or more proteins of the glycine cleavage system are used to produce glycine from M-THF, CO₂, NH₃ and NADH. In some embodiments, the proteins of the glycine cleavage system comprise: i) P-protein (a pyridoxal phosphate-containing protein) or glycine decarboxylase (EC 1.4.4.2), ii) T-protein or aminomethyl-transferase (EC 2.1.2.10), iii) L-protein or dihydrolipoamide dehydrogenase (EC1.8.1.4), and iv) a carrier protein called H-protein (a lipoic acid-containing protein). In some embodiments, the enzyme having glycine decarboxylase activity is encoded by an amino acid sequence having at least 70% sequence identity, having at least 80% sequence identity, or having at least 90% sequence identity to E. coli gcvP. In some embodiments, the one or more nucleic acid molecule encoding an enzyme having glycine decarboxylase activity comprises an amino acid sequence set forth in UniProt ID P33195. In a further embodiment, the one or more nucleic acid molecule encoding an enzyme having glycine decarboxylase activity comprises a nucleic acid sequence set forth in Gene ID 947394. In some embodiments, the enzyme having aminomethyltransferase activity is encoded by an amino acid sequence having at least 70% sequence identity, having at least 80% sequence identity, or having at least 90% sequence identity to E. coli gcvT. In some embodiments, the one or more nucleic acid molecule encoding an enzyme having aminomethyltransferase activity comprises an amino acid sequence set forth in UniProt ID P27248. In a further embodiment, the one or more nucleic acid molecule encoding an enzyme having aminomethyltransferase activity comprises a nucleic acid sequence set forth in Gene ID 947390. In some embodiments, the enzyme having dihydrolipoamide dehydrogenase activity is encoded by an amino acid sequence having at least 70% sequence identity, having at least 80% sequence identity, or having at least 90% sequence identity to E. coli Ipd (IpdA, E3 subunit). In some embodiments, the one or more nucleic acid molecule encoding an enzyme having dihydrolipoamide dehydrogenase activity comprises an amino acid sequence set forth in UniProt ID P0A9P0. In a further embodiment, the one or more nucleic acid molecule encoding an enzyme having dihydrolipoamide dehydrogenase activity comprises a nucleic acid sequence set forth in Gene ID 944854. In some embodiments, the H-protein is encoded by an amino acid sequence having at least 70% sequence identity, having at least 80% sequence identity, or having at least 90% sequence identity to E. coli gcvH. In some embodiments, the one or more nucleic acid molecule encoding an H-protein comprises an amino acid sequence set forth in UniProt ID P0A6T9. In a further embodiment, the one or more nucleic acid molecule encoding an H-protein is encoded by a nucleic acid sequence set forth in Gene ID 947393.

[0938] In some embodiments, an enzyme having glycolate dehydrogenase activity is used to convert glycolic acid to glyoxylate. In some embodiments, the enzyme having glycolate dehydrogenase activity is encoded by an amino acid sequence having at least 70% sequence identity, having at least 80% sequence identity, or having at least 90% sequence identity to an enzyme having glycolate dehydrogenase activity selected from E. coli glycolate dehydrogenase GLC and Arabidopsis thaliana glycolate dehydrogenase. In some embodiments, the one or more nucleic acid molecule encoding an enzyme or enzyme subunit associated with glycolate dehydrogenase activity comprises an amino acid sequence selected from UniProt ID P0AEP9, UniProt ID P52073, UniProt ID P52074, and UniProt ID Q94AX4. In a further embodiment, the one or more nucleic acid molecule encoding an enzyme or enzyme subunit associated with glycolate dehydrogenase activity comprises a nucleic acid sequence selected from Gene ID 947353, Gene ID 2847718, Gene ID 2847717, and GenBank accession Y13245.1.

[0939] In some embodiments, an enzyme having alanine-glyoxylate aminotransferase activity is used to convert glyoxylate to glycine. In some embodiments, the enzyme having alanine-glyoxylate aminotransferase activity is encoded by an amino acid sequence having at least 70% sequence identity, having at least 80% sequence identity, or having at least 90% sequence identity to an enzyme having alanine-glyoxylate aminotransferase activity selected from Saccharomyces cerevisiae AGX1, Homo sapiens AGXT2, Arabidopsis thaliana AOAT1 and Arabidopsis thaliana AOAT2. In some embodiments, the one or more nucleic acid molecule encoding an enzyme having alanine-glyoxylate aminotransferase activity comprises an amino acid sequence selected from UniProt ID P43567, UniProt ID Q9BYV1, UniProt ID Q9LR30 and UniProt ID Q9S7E9. In a further embodiment, the one or more nucleic acid molecule encoding an enzyme having alanine-glyoxylate aminotransferase activity comprises a nucleic acid sequence selected from Gene ID 850514, Gene ID 64902, TAIR accession AT1G23310 and TAIR accession AT1G70580.

[0940] In some embodiments, an enzyme having alanine transaminase activity is used to reconstitute alanine from pyruvate and glutamate. In some embodiments, the enzyme having alanine transaminase activity is encoded by an amino acid sequence having at least 70% sequence identity, having at least 80% sequence identity, or having at least 90% sequence identity to an enzyme having alanine transaminase activity selected from E. coli glutamate-pyruvate aminotransferase alaA, E. coli glutamate-pyruvate aminotransferase alaB, E. coli glutamate-pyruvate aminotransferase alaC, Homo sapiens alanine aminotransferase 1 (GPT), Homo sapiens alanine aminotransferase 2 (GPT2), Arenicola marina alanine transaminase, Arabidopsis thaliana tryptophan aminotransferase TAA1, Arabidopsis thaliana AOAT1, Arabidopsis thaliana AOAT2, Candida maltosa alanine aminotransferase, Clostridium propionicum alanine aminotransferase, Pyrococcus furiosus alanine aminotransferase aat, Megathyrsus maximus alanine transaminase, and Panicum miliaceum alanine transaminase AlaAT-2. In some embodiments, the one or more nucleic acid molecule encoding an enzyme having alanine transaminase activity comprises an amino acid sequence selected from UniProt ID P0A959, UniProt ID P77434, UniProt ID P24298, UniProt ID Q8TD30, UniProt ID Q9S7N2, UniProt ID Q9LR30, UniProt ID Q9S7E9, UniProt ID Q9P9M8, and UniProt ID P34106. In a further embodiment, the one or more nucleic acid molecule encoding an enzyme having alanine transaminase activity comprises a nucleic acid sequence selected from Gene ID 946772, Gene ID 946850, Gene ID 2875, Gene ID 84706, Gene ID 843393, TAIR accession AT1G23310, TAIR accession AT1G70580, GenBank accession AF163769.1 and GenBank accession X69421.1.

[0941] In some embodiments, an enzyme having glutamate dehydrogenase activity is used to reconstitute glutamate from ammonia and 2-oxoglutarate. In some embodiments, the enzyme having glutamate dehydrogenase activity is encoded by an amino acid sequence having at least 70% sequence identity, having at least 80% sequence identity, or having at least 90% sequence identity to an enzyme having glutamate dehydrogenase activity selected from Saccharomyces cerevisiae NAD-dependent glutamate dehydrogenase GDH2, Arabidopsis thaliana NAD-dependent glutamate dehydrogenase GDH2, Arabidopsis thaliana NAD-dependent glutamate dehydrogenase GDH1, Peptoniphilus asaccharolyticus NAD-dependent glutamate dehydrogenase gdhA, Halobacterium salinarum NAD-dependent glutamate dehydrogenase gdhA, Thermotoga maritima glutamate dehydrogenase, Homo sapiens glutamate dehydrogenase 1 (GLUD1), Homo sapiens glutamate dehydrogenase 2 (GLUD2), Bacillus subtilis glutamate dehydrogenase and Solanum lycopersicum glutamate dehydrogenase GDH1. In some embodiments, the one or more nucleic acid molecule encoding an enzyme having glutamate dehydrogenase activity comprises an amino acid sequence selected from UniProt ID P33327, UniProt ID Q38946, UniProt ID Q38946, UniProt ID P28997, UniProt ID P29051, UniProt ID P00367, UniProt ID P49448 and UniProt ID P93541. In a further embodiment, the one or more nucleic acid molecule encoding an enzyme having glutamate dehydrogenase activity is encoded by a nucleic acid sequence selected from Gene ID 461927, TAIR accession AT5G07440, TAIR accession AT5G18170, GenBank accession M76403.1, GenBank accession X63837.1, Gene ID 2746, Gene ID 2747 and GenBank accession U48695.1.

[0942] Production of monoethanolamine (MEA)

[0943] MEA can be produced via decarboxylation of Ser or transamination of glycolaldehyde.

[0944] In some preferred embodiments, serine decarboxylases are utilized, since they are found naturally, i.e. in choline biosynthesis pathways in plants, and the transamination of a glycolaldehyde intermediate would create a cross talk between the MEG and MEA pathway.

[0945] Alternatively, in another embodiment, MEA may be formed by ethanolamine ammonia lyase (EC 4.3.1.7) from acetaldehyde and ammonia:

Acetaldehyde+NH₃↔ethanolamine

[0946] In this case, MEA is not formed via the Ser biosynthesis pathway, but rather from acetyl-CoA and its reduction to acetaldehyde by acetaldehyde dehydrogenase. While the redox situation does not change, this pathway yields +1 ATP versus the Ser based pathway. It also avoids the toxic intermediate Ser, but has the toxic and volatile intermediate acetaldehyde.

[0947] In some embodiments, the production of MEG and MEA is very close to the thermodynamic maximum yield potential using the lossless conversion of one or more pentose and/or hexose sugars to D-ribose-5-phosphate intermediate, followed by the conversion of the D-ribose-5-phosphate intermediate to glycolaldehyde and D-glyceraldehyde-3-phosphate (G3P) intermediates, and then followed by the co-production of MEG via reduction of glycolaldehyde and MEA via one or more C3 pathways from the G3P intermediate. In some embodiments, the thermodynamic yield potential is 15% better for co-production of MEG and MEA via the pathways disclosed in the present application compared to production of MEA made from glucose by natural or published similar pathways.

[0948] Co-production, Ser pathway: (pentose or hexose)+NH₃->MEG+MEA+0 ATP*

[0949] Co-production, acetaldehyde pathway: (pentose or hexose)+NH₃->MEG+MEA+1 ATP*

[0950] Y(pathway)=(0.371+0.365) g/g=0.736 g(MEG+MEA)/g((pentose or hexose)+NH₃), 98% of Y(max)(heat of combustion)=0.749 g/g

[0951] Standard pathway: glucose+2 NH₃->2 MEA+2 NADH+0 ATP

[0952] Y(pathway)=0.570 g(MEA)/g(glucose+2NH₃), 85% of Y(max)(heat of combustion)=0.669 g/g

[0953] *Passive or H+ symport transport of D-xylose, a pentose, is assumed. Indirect ATP consumption for a H+ symporter or ATP required for cell maintenance are not accounted for.

[0954] In some embodiments, MEG and MEA are co-produced from the lossless transformation of one or more pentose and/or hexose sugars to D-ribose-5-phosphate intermediate, followed by a conversion of the D-ribose-5-phosphate intermediate to glycolaldehyde and D-glyceraldehyde-3-phosphate (G3P) intermediates, followed by a conversion of the glycolaldehyde intermediate to MEG via a C2 pathway, and a conversion of G3P intermediate to MEA via one or more C3 pathways.

[0955] [U] In one embodiment, the application relates to a recombinant microorganism capable of co-producing monoethylene glycol (MEG) and MEA from one or more pentose and/or hexose sugars and a nitrogen source, wherein the recombinant microorganism from embodiment [A], from embodiment [B], or from embodiment [C] (and optionally comprising embodiment [D]), and having additionally embodiment [E] for production of MEG in a C2 pathway, further expresses one or more of the following from (a) to (i):

[0956] (a) at least one endogenous or exogenous nucleic acid molecule encoding an enzyme having 3-phosphoglycerate dehydrogenase activity that catalyzes the conversion of 3-phosphoglycerate to 3-phosphohydroxypyruvate;

[0957] (b) at least one endogenous or exogenous nucleic acid molecule encoding an enzyme having 3-phosphoglycerate phosphatase activity and/or an enzyme having glycerate 3-kinase activity that catalyzes the conversion of 3-phosphoglycerate to glycerate;

[0958] (c) at least one endogenous or exogenous nucleic acid molecule encoding an enzyme having 2-phosphoglycerate phosphatase activity and/or an enzyme having glycerate 2-kinase activity that catalyzes the conversion of 2-phosphoglycerate to glycerate;

[0959] (d) at least one endogenous or exogenous nucleic acid molecule encoding an enzyme having phosphoserine aminotransferase activity that catalyzes the conversion of 3-phosphohydroxypyruvate from (a) to phospho-L-serine;

[0960] (e) at least one endogenous or exogenous nucleic acid molecule encoding an enzyme having 3-phosphohydroxypyruvate phosphatase activity that catalyzes the conversion of 3-phosphohydroxypyruvate from (a) to hydroxypyruvate;

[0961] (f) at least one endogenous or exogenous nucleic acid molecule encoding an enzyme having phosphoserine phosphatase activity that catalyzes the conversion of phospho-L-serine from (d) to L-serine;

[0962] (g) at least one endogenous or exogenous nucleic acid molecule encoding an enzyme having hydroxypyruvate reductase activity that catalyzes the conversion of glycerate from (b) and/or (c) to hydroxypyruvate;

[0963] (h) at least one endogenous or exogenous nucleic acid molecule encoding an enzyme having serine-pyruvate aminotransferase activity that catalyzes the conversion of hydroxypyruvate from (e) and/or (g) to L-serine;

[0964] (i) at least one endogenous or exogenous nucleic acid molecule encoding an enzyme having serine decarboxylase activity that catalyzes the conversion of L-serine from (f) and/or (h) to MEA;

wherein the produced intermediate G3P from embodiment [A], from embodiment [B], or from embodiment [C] is converted to 3-phosphoglycerate and/or 2-phosphoglycerate through endogenous glycolysis in the microorganism, and wherein MEG and MEA are co-produced.

[0965] [V] In one embodiment, the application relates to a recombinant microorganism capable of co-producing monoethylene glycol (MEG) and MEA from one or more pentose and/or hexose sugars and a nitrogen source, wherein the recombinant microorganism from embodiment [A], from embodiment [B], or from embodiment [C] (and optionally comprising embodiment [D]), and having additionally embodiment [E] for production of MEG in a C2 pathway, further expresses one or more of the following from (a) to (f):

[0966] (a) at least one endogenous or exogenous nucleic acid molecule encoding an enzyme having 2-phosphoglycerate phosphatase activity and/or an enzyme having glycerate-2-kinase activity that catalyzes the conversion of 2-phosphoglycerate to glycerate;

[0967] (b) at least one endogenous or exogenous nucleic acid molecule encoding an enzyme having 3-phosphoglycerate phosphatase activity and/or an enzyme having glycerate-3-kinase activity that catalyzes the conversion of 3-phosphoglycerate to glycerate;

[0968] (c) at least one endogenous or exogenous nucleic acid molecule encoding an enzyme having hydroxypyruvate reductase activity that catalyzes the conversion of glycerate from (a) and/or (b) to hydroxypyruvate;

[0969] (d) at least one endogenous or exogenous nucleic acid molecule encoding an enzyme having serine-pyruvate aminotransferase or serine oxidoreductase (deaminating) activity that catalyzes the conversion of L-serine to hydroxypyruvate;

[0970] (e) at least one endogenous or exogenous nucleic acid molecule encoding an enzyme having hydroxypyruvate decarboxylase activity that catalyzes the conversion of hydroxypyruvate from (c) and/or (d) to glycolaldehyde;

[0971] (f) at least one endogenous or exogenous nucleic acid molecule encoding an enzyme having transaminase activity that catalyzes the conversion of glycolaldehyde from (e) to MEA;

wherein the produced intermediate G3P from embodiment [A] or from embodiment [B] is converted to 3-phosphoglycerate and/or 2-phosphoglycerate through endogenous glycolysis in the microorganism, and wherein MEG and MEA are co-produced.

[0972] [W] In one embodiment, the application relates to a recombinant microorganism capable of co-producing monoethylene glycol (MEG) and MEA from one or more pentose and/or hexose sugars and a nitrogen source, wherein the recombinant microorganism from embodiment [A], from embodiment [B], or from embodiment [C] (and optionally comprising embodiment [D]), and having additionally embodiment [E] for production of MEG in a C2 pathway, further expresses one or more of the following from (a) to (b):

[0973] (a) at least one endogenous or exogenous nucleic acid molecule encoding an enzyme having acetaldehyde dehydrogenase activity that catalyzes the conversion of acetyl-CoA to acetaldehyde;

[0974] (b) at least one endogenous or exogenous nucleic acid molecule encoding an enzyme having ethanolamine ammonia lyase activity that catalyzes the conversion of acetaldehyde and ammonia to MEA;

wherein the produced intermediate G3P from embodiment [A], from embodiment [B], or from embodiment [C] is converted to acetyl-CoA through endogenous glycolysis in the microorganism, and wherein MEG and MEA are co-produced.

[0975] In some embodiments, an enzyme having acetaldehyde dehydrogenase activity is used to reduce acetyl-CoA to acetaldehyde. In some embodiments, the enzyme having acetaldehyde dehydrogenase activity is encoded by an amino acid sequence having at least 70% sequence identity, having at least 80% sequence identity, or having at least 90% sequence identity to an enzyme having acetaldehyde dehydrogenase activity selected from E. coli mhpF, E. coli AdhE, Chlamydomonas reinhardtii ADH1, Leuconostoc mesenteroides CoA-dependent acetaldehyde dehydrogenase, Pelobacter acetylenicus acetaldehyde dehydrogenase, Pseudomonas sp. dmpF, Pseudomonas putida acylating aldehyde dehydrogenase todI, Pseudomonas putida acetaldehyde dehydrogenase cmtH and Clostridium acetobutylicum alcohol/aldehyde dehydrogenase AdhE. In some embodiments, the one or more nucleic acid molecule encoding an enzyme having acetaldehyde dehydrogenase activity comprises an amino acid sequence selected from UniProt ID P77580, UniProt P0A9Q7, UniProt ID A8JI07, UniProt ID Q52060, UniProt ID Q51949 and UniProt ID P33744. In a further embodiment, the one or more nucleic acid molecule encoding an enzyme having acetaldehyde dehydrogenase activity comprises a nucleic acid sequence selected from Gene ID 945008, Gene ID 945837, Gene ID 5729132, GenBank accession X60835.1, GenBank accession U09250.1 and Gene ID 1116167.

[0976] In some embodiments, an enzyme having ethanolamine ammonia lyase activity is used to convert acetaldehyde and ammonia to MEA. In some embodiments, the enzyme having ethanolamine ammonia lyase activity is encoded by an amino acid sequence having at least 70% sequence identity, having at least 80% sequence identity, or having at least 90% sequence identity to an E. coli ethanolamine ammonia lyase. In some embodiments, the one or more nucleic acid molecule encoding an ethanolamine ammonia lyase subunit comprises an amino acid sequence selected from UniProt ID P0AEJ6 and UniProt ID P19636. In a further embodiment, the one or more nucleic acid molecule encoding an ethanolamine ammonia lyase subunit is encoded by a nucleic acid sequence selected from Gene ID 946924 and Gene ID 946925.

[0977] Production of Ethylenediamine (EDA)

[0978] EDA can be produced by any of the pathways A through E described in WO 2014/049382, which is herein incorporated in its entirety (FIG. 7).

[0979] In some embodiments, MEG and EDA are co-produced from the lossless transformation of one or more pentose and/or hexose sugars to D-ribose-5-phosphate intermediate, followed by a conversion of the D-ribose-5-phosphate intermediate to glycolaldehyde and D-glyceraldehyde-3-phosphate (G3P) intermediates, followed by a conversion of the glycolaldehyde intermediate to MEG via a C2 pathway, and a conversion of G3P intermediate to EDA via one or more C3 pathways.

[0980] [X] In one embodiment, the application relates to a recombinant microorganism capable of co-producing monoethylene glycol (MEG) and ethylenediamine (EDA), from one or more pentose and/or hexose sugars and a nitrogen source, wherein the recombinant microorganism from embodiment [A], from embodiment [B], or from embodiment [C] (and optionally comprising embodiment [D]), and having additionally embodiment [E] for production of MEG in a C2 pathway, further expresses one or more of the following from (a) to (c):

[0981] (a) at least one endogenous or exogenous nucleic acid molecule encoding an enzyme having serine dehydrogenase activity that catalyzes the conversion of L-serine to 2-aminomalonate semialdehyde;

[0982] (b) at least one endogenous or exogenous nucleic acid molecule encoding an enzyme having 2-aminomalonate semialdehyde decarboxylase activity that catalyzes the conversion of 2-aminomalonate semialdehyde from (a) to aminoacetaldehyde;

[0983] (c) at least one endogenous or exogenous nucleic acid molecule encoding an enzyme having aminoacetaldehyde transaminase activity that catalyzes the conversion of aminoacetaldehyde from (b) to EDA;

wherein 2-aminomalonate semialdehyde may optionally be converted to aminoacetaldehyde by a spontaneous reaction, and wherein MEG and EDA are co-produced.

[0984] According to this aspect of the disclosure, the recombinant microorganism overexpresses at least one of the genes encoding enzymes exhibiting activity of serine dehydrogenase and aminoacetaldehyde transaminase. These genes may be endogenous genes or exogenous genes.

[0985] The first reaction of the conversion of L-serine into 2-aminomalonate semialdehyde is catalysed by a serine dehydrogenase enzyme. This enzyme belongs to the large enzyme family of alcohol dehydrogenases also called aldehyde reductases. Several enzymes are known to exhibit serine dehydrogenase activity. In one embodiment of the disclosure, these enzymes are encoded by genes chosen among a list of genes well known in the art (Chowdhury et al., 1996, Yao et al., 2010, Tchigvintsev et al., 2012, Fujisawa et al., 2003, Hawes et al., 1996 and Lokanath et al., 2005), including but not limited to the genes listed here: mmsB from Pseudomonas putida, from Synechococcus PCC6301 or from Bacillus cereus; hibdh from Pseudomonas putida E23; PA0743 from Pseudomonas aeruginosa; ydfG from Escherichia coli or from Bacillus brevis or from Bacillus subtilis; sdh from Agrobacterium tumefaciens; hibadh from Rattus norvegicus or from Thermus thermophilus HB8; yiaY from Escherichia coli.

[0986] In a preferred embodiment of the disclosure, the serine dehydrogenase is encoded by ydfG from Escherichia coli or mmsB from Pseudomonas putida, or yiaY from Escherichia coli. Preferably, these enzymes are optimized by mutating the encoding genes in order to improve their catalytic efficiency of L-serine into 2-aminomalonate semialdehyde.

[0987] In another embodiment of the disclosure the serine dehydrogenase enzyme is obtained by evolving enzymes in order to modify their substrate specificity and/or their catalytic efficiency to obtain an enzyme which exhibits specificity for serine and activity of serine dehydrogenase. These enzymes are selected among the group of enzymes having the same type of catalytic activity on substrates chemically similar to L-serine. Preferably these enzymes may be chosen among 3-hydroxyisobutyrate dehydrogenases and serine dehydrogenases. More preferably they are encoded by genes chosen among a list of genes well known in the art, including but not limited to the genes here: gldA from Escherichia coli or from Leuconostoc citreum or from Symbiobacterium thermophilum; yqhE from Escherichia coli; yafB from Escherichia coli; air from Leishmania donovani; sakR1 from Synechococcus sp.; yhdN from Bacillus subtilis; ytbE from Bacillus subtilis; AKR4C9 from Arabidopsis thaliana; fucO from Escherichia coli. Any polypeptide having at least 90% sequence identity to any of the polypeptides encoded by these genes may be used.

[0988] Evolution of these enzymes is carried out by means and methods well known by one skilled in the art in order to obtain enzyme having improved specificity for the substrate L-serine and/or enabling to convert it into 2-aminomalonate semialdehyde with an improved activity. The selection of the evolved enzymes is performed by expressing the evolved enzymes in the microorganism of the disclosure or in vitro with L-serine as substrate and by detecting the product 2-aminomalonate semialdehyde.

[0989] The second reaction of the conversion of 2-aminomalonate semialdehyde into aminoacetaldehyde is performed spontaneously in the cell (Fujisawa et al., 2003). In another embodiment of the disclosure, the second reaction of conversion of 2-aminomalonate semialdehyde into aminoacetaldehyde is catalysed by an enzyme having 2-aminomalonate semialdehyde decarboxylase activity. This enzyme is not encountered naturally. Therefore it is obtained by evolution of known enzyme or by screening metagenomic libraries. The 2-aminomalonate semialdehyde decarboxylase activity is performed with an evolved amino acid decarboxylase or an evolved keto-acid decarboxylase which catalyses the decarboxylation of amino acids or keto acids. Preferably an evolved amino acid decarboxylase is chosen. More preferably the evolved amino acid decarboxylase is chosen among histidine decarboxylase, serine decarboxylase, aspartate decarboxylase, diaminobutanoate decarboxylase, omithine decarboxylase. These enzymes are encoded by genes chosen among a list of genes well known in the art, including but not limited to the genes listed here: sdc from Arabidopsis thaliana; panD from Aquifex aeolicus or from Bacillus subtilis; GAD or GAD2 or GAD3 or GAD4 or GAD5 from Arabidopsis thaliana; GAD or GAD2 or OAZ1 or ODC1 from Bos Taurus; gadA or gadB or panD or speC or speF from Escherichia coli; SCC105.13 from Streptomyces coelicolor, gadB from Mannheimia succiniciproducens; bdb from Haloferax volcanii; odc1 from Lactobacillus sp.; kivD from Lactococcus lactis subsp. Lactis; kdcA from Lactococcus lactis; OAZ1 or ODC1 from Bos Taurus; speC or speF from Escherichia coli; SPE1 from Saccharomyces cerevisiae. Any polypeptide having at least 90% sequence identity to any of the polypeptides encoded by these genes may be used. Preferably, the sdc gene from Arabidopsis thaliana is used for obtaining the 2-aminomalonate semialdehyde decarboxylase activity.

[0990] Evolution of these enzymes is carried out by means and methods well known by one skilled in the art in order to obtain enzymes having specificity for the substrate 2-aminomalonate semialdehyde and enabling to convert it into aminoacetaldehyde. The selection of the evolved enzyme is performed by expressing the evolved enzyme in the microorganism of the invention or in vitro with 2-aminomalonate semialdehyde as substrate and by quantifying the product aminoacetaldehyde.

[0991] The last reaction of the conversion of aminoacetaldehyde into ethylenediamine is catalysed by an aminoacetaldehyde transaminase. This enzyme is not encountered naturally. Therefore it is obtained by evolution of a known enzyme or by screening metagenomic libraries. In one embodiment of the invention, the aminoacetaldehyde transaminase activity is performed with an evolved transaminase or aminotransferase which catalyses the exchange of an amino group of one molecule with an oxo group on another molecule. Preferably, the evolved aminotransferase is chosen among phosphoserine aminotransferase or aspartate aminotransferase or glutamate aminotransferase. More preferably, the evolved aminotransferase is chosen among aminotransferases using glutamate as amino group donor. These enzymes are encoded by genes chosen among a list of genes well known in the art, including but not limited to the genes listed here: serC from Escherichia coli or from Bacillus subtilis or from Corynebacterium glutamicum; GOT1 from Sus scrofa; patA from Escherichia coli; ygjG from Brucella canis; rocD from Rhizobium NGR 234 or from Streptomyces avermitilis; SCO1284 from Streptomyces coelicolor AGT or AGT2 or AGT3 or GGT1 from Arabidopsis thaliana; AGXT from Bos taurus. Any polypeptide having at least 90% sequence identity to any of the polypeptides encoded by these genes may be used. Preferably, genes serC from Escherichia coli or GOT1 from Sus scrofa are used for obtaining the aminoacetaldehyde transaminase activity.

[0992] Evolution of these enzymes is carried out by means and methods well known by one skilled in the art in order to obtain enzymes having specificity for the substrate aminoacetaldehyde and enabling to convert it into ethylenediamine. The selection of the evolved enzyme is done by expressing the evolved enzyme in the microorganism of the invention or in vitro with aminoacetaldehyde as substrate and by detecting the product ethylenediamine.

[0993] In another embodiment of the disclosure, aminoacetaldehyde transaminase enzymes can be isolated from strains growing on ethylenediamine as sole carbon and nitrogen source. For this purpose enrichment cultures from environmental samples on ethylenediamine are cultivated on minimal medium with ethylenediamine as sole nitrogen and carbon source. Metagenomic libraries are generated from these cultures and screened for the presence of aminoacetaldehyde transaminase enzymes. This approach allows isolating the gene corresponding to the enzymatic activity and is well-known to the expert in the field.

[0994] According to a specific aspect of the disclosure, the microorganism from embodiment [X] is engineered to overexpress at least one of the following genes: ydfG gene or mmsB gene or yiaY gene, encoding for the serine dehydrogenase; and/or an evolved serC gene or GOT1 gene, encoding for the aminoacetaldehyde transaminase activity.

[0995] [Y] In one embodiment, the application relates to a recombinant microorganism capable of co-producing monoethylene glycol (MEG) (or glycolic acid) and ethylenediamine (EDA), from one or more pentose and/or hexose sugars and a nitrogen source, wherein the recombinant microorganism from embodiment [A], from embodiment [B], or from embodiment [C] (and optionally comprising embodiment [D]), and having additionally embodiment [E] for production of MEG in a C2 pathway, further expresses one or more of the following from (a) to (c):

[0996] (a) at least one endogenous or exogenous nucleic acid molecule encoding an enzyme having serine dehydrogenase activity that catalyzes the conversion of L-serine to 2-aminomalonate semialdehyde;

[0997] (b) at least one endogenous or exogenous nucleic acid molecule encoding an enzyme having 2-aminomalonate semialdehyde transaminase activity that catalyzes the conversion of 2-aminomalonate semialdehyde from (a) to 2,3-diaminopropanoate;

[0998] (c) at least one endogenous or exogenous nucleic acid molecule encoding an enzyme having 2,3-diaminopropanoate decarboxylase activity that catalyzes the conversion of 2,3-diaminopropanoate from (b) to EDA;

wherein MEG and EDA are co-produced.

[0999] According to this aspect of the disclosure, the recombinant microorganism overexpresses at least one of the genes encoding enzymes exhibiting activity of serine dehydrogenase, 2-aminomalonate semialdehyde transaminase and 2,3-diaminopropanoate decarboxylase. These genes may be endogenous genes or exogenous genes.

[1000] The first reaction of conversion of L-serine into 2-aminomalonate semialdehyde is catalysed by a serine dehydrogenase enzyme. This enzyme belongs to the large enzyme family of alcohol dehydrogenases also called aldehyde reductases. Several enzymes are known to exhibit serine dehydrogenase activity. In one embodiment of the disclosure, the serine dehydrogenase is chosen among these known enzymes. These enzymes are encoded by genes chosen among a list of genes well known in the art (Chowdhury et al., 1996, Yao et al., 2010, Tchigvintsev et al., 2012, Fujisawa et al., 2003, Hawes et al., 1996 and Lokanath et al., 2005), including but not limited to the genes listed here: mmsB from Pseudomonas putida, from Synechococcus PCC6301 or from Bacillus cereus; hibdh from Pseudomonas putida E23; PA0743 from Pseudomonas aeruginosa; ydfG from Escherichia coli or from Bacillus brevis or from Bacillus subtilis; sdh from Agrobacterium tumefaciens; hibadh from Rattus norvegicus or from Thermus thermophilus HB8; yiaY from Escherichia coli.

[1001] In a preferred embodiment of the disclosure, the serine dehydrogenase is encoded by ydfG from Escherichia coli or mmsB from Pseudomonas putida, or yiaY from Escherichia coli. Preferably, these enzymes are optimized by mutating the encoding genes in order to improve their catalytic efficiency of L-serine into 2-aminomalonate semialdehyde.

[1002] In another embodiment of the disclosure the serine dehydrogenase enzyme is obtained by evolving enzymes in order to modify their substrate specificity and/or their catalytic efficiency to obtain an enzyme which exhibits specificity for serine and activity of serine dehydrogenase. These enzymes are selected among the group of enzymes having the same type of catalytic activity on substrates chemically similar to L-serine. Preferably these enzymes may be chosen among 3-hydroxyisobutyrate dehydrogenases and serine dehydrogenases. More preferably they are encoded by genes chosen among a list of genes well known in the art, including but not limited to the genes here: gldA from Escherichia coli or from Leuconostoc citreum or from Symbiobacterium thermophilum; yqhE from Escherichia coli; yafB from Escherichia coli; air from Leishmania donovani; sakR1 from Synechococcus sp.; yhdN from Bacillus subtilis; ytbE from Bacillus subtilis; AKR4C9 from Arabidopsis thaliana; fucO from Escherichia coli. Any polypeptide having at least 90% sequence identity to any of the polypeptides encoded by these genes may be used.

[1003] Evolution of these enzymes is carried out by means and methods well known by one skilled in the art in order to obtain enzyme having improved specificity for the substrate L-serine and/or enabling to convert it into 2-aminomalonate semialdehyde with an improved activity. The selection of the evolved enzymes is performed by expressing the evolved enzymes in the microorganism of the disclosure or in vitro with L-serine as substrate and by detecting the product 2-aminomalonate semialdehyde.

[1004] The second reaction of conversion of 2-aminomalonate semialdehyde into 2,3-diaminopropanoate is catalysed by a 2-aminomalonate semialdehyde transaminase. This enzyme is not encountered naturally. Therefore it is obtained by evolution of a known enzyme or by screening metagenomic libraries. The 2-aminomalonate semialdehyde transaminase activity is performed with an evolved transaminase or aminotransferase which catalyses the exchange of an amino group of one molecule with an oxo group of another molecule. Preferably the evolved aminotransferase is chosen among phosphoserine aminotransferase or aspartate aminotransferase or glutamate aminotransferase. More preferably, the evolved aminotransferase is chosen among aminotransferase using glutamate as amino group donor. These enzymes are encoded by genes chosen among a list of genes well known in the art, including but not limited to the genes listed here: serC from Escherichia coli or from Bacillus subtilis or from Corynebacterium glutamicum; GOT1 from Sus scrofa; patA from Escherichia coli; ygjG from Brucella canis; rocD from Rhizobium NGR 234 or from Streptomyces avermitilis; SCO1284 from Streptomyces coelicolor AGT or AGT2 or AGT3 or GGT1 from Arabidopsis thaliana; AGXT from Bos taurus. Any polypeptide having at least 90% sequence identity to any of the polypeptides encoded by these genes may be used. Preferably, genes serC from Escherichia coli or GOT1 from Sus scrofa are used for obtaining the 2-aminomalonate semialdehyde transaminase activity.

[1005] Evolution of these enzymes is carried out by means and methods well known by the man skilled in the art in order to obtain enzymes having improved specificity for the substrate 2-aminomalonate semialdehyde and/or enabling to convert it into 2,3-diaminopropanoate with an improved activity. The selection of the evolved enzyme is done by expressing the evolved enzyme in the microorganism of the invention or in vitro with 2-aminomalonate semialdehyde as substrate and by quantifying the product 2,3-diaminopropanoate.

[1006] The third reaction of conversion of 2,3-diaminopropanoate into ethylenediamine is catalysed by an enzyme having 2,3-diaminopropanoate decarboxylase activity. This enzyme is not encountered naturally. Therefore it is obtained by evolution of known enzyme or by screening metagenomic libraries. The 2,3-diaminopropanoate decarboxylase activity is performed with an evolved amino acid decarboxylase or an evolved keto-acid decarboxylase which catalyses the decarboxylation of amino acids or keto-acids. Preferably an evolved amino acid decarboxylase is chosen. More preferably the evolved amino acid decarboxylase is chosen among histidine decarboxylase, serine decarboxylase, aspartate decarboxylase, diaminobutanoate decarboxylase, omithine decarboxylase. These enzymes are encoded by genes chosen among a list of genes well known in the art, including but not limited to the genes listed here: sdc from Arabidopsis thaliana; padC or yclB from Bacillus subtilis; ubiD from Campylobacter jejuni or from Escherichia coli; PAD1 or GAD1 or SPE1 from Saccharomyces cerevisiae; panD from Aquifex aeolicus or from Bacillus subtilis; GAD or GAD2 or GAD3 or GAD4 or GAD5 from Arabidopsis thaliana; GAD or GAD2 or OAZ1 or ODC1 from Bos Taurus; gadA or gadB or panD or speC or speF from Escherichia coli; SCC105.13 from Streptomyces coelicolor, gadB from Mannheimia succiniciproducens; bdb from Haloferax volcanii; odc1 from Lactobacillus sp.; kivD from Lactococcus lactis subsp. Lactis; kdcA from Lactococcus lactis; OAZ1 or ODC1 from Bos Taurus; speC or speF from Escherichia coli; SPE1 from Saccharomyces cerevisiae. Any polypeptide having at least 90% sequence identity to any of the polypeptides encoded by these genes may be used. Preferably, the sdc gene from Arabidopsis thaliana is used for obtaining the 2,3-diaminopropanoate decarboxylase activity.

[1007] Evolution of these enzymes is carried out by means and methods well known by the man skilled in the art in order to obtain enzymes having improved specificity for the substrate 2,3-diaminopropanoate and/or enabling to convert it into ethylenediamine with an improved activity. The selection of the evolved enzyme is performed by expressing the evolved enzyme in the microorganism of the invention or in vitro with 2,3-diaminopropanoate as substrate and by quantifying the product ethylenediamine. According to a specific aspect of the disclosure, the microorganism from embodiment [Y] is engineered to overexpress: ydfG gene, yiaY gene or mmsB gene, encoding for the serine dehydrogenase; and/or evolved serC gene or GOT1 gene, encoding for 2-aminomalonate semialdehyde transaminase activity; and/or evolved sdc gene from Arabidopsis thaliana, coding for the 2,3-diaminopropanoate decarboxylase.

[1008] [Z] In one embodiment, the application relates to a recombinant microorganism capable of co-producing monoethylene glycol (MEG) (or glycolic acid) and ethylenediamine (EDA), from one or more pentose and/or hexose sugars and a nitrogen source, wherein the recombinant microorganism from embodiment [A], from embodiment [B], or from embodiment [C] (and optionally comprising embodiment [D]), and having additionally embodiment [E] for production of MEG in a C2 pathway, further expresses one or more of the following from (a) to (c):

[1009] (a) at least one endogenous or exogenous nucleic acid molecule encoding an enzyme having serine decarboxylase activity that catalyzes the conversion of L-serine to ethanolamine;

[1010] (b) at least one endogenous or exogenous nucleic acid molecule encoding an enzyme having ethanolamine dehydrogenase activity that catalyzes the conversion of ethanolamine from (a) to aminoacetaldehyde;

[1011] (c) at least one endogenous or exogenous nucleic acid molecule encoding an enzyme having aminoacetaldehyde transaminase activity that catalyzes the conversion of aminoacetaldehyde from (b) to EDA;

wherein MEG and EDA are co-produced.

[1012] According to this aspect of the disclosure, the recombinant microorganism overexpresses at least one of the genes encoding enzymes exhibiting activity of serine decarboxylase, ethanolamine dehydrogenase and aminoacetaldehyde transaminase. These genes may be endogenous genes or exogenous genes.

[1013] The first reaction of conversion of L-serine into ethanolamine is catalyzed by an enzyme having serine decarboxylase activity. This group of enzymes catalyses the decarboxylation of L-serine into ethanolamine. In a preferred embodiment of the invention, the serine decarboxylase is encoded by sdc from Arabidopsis thaliana (Rontein et al., 2001, WO2007/144346). The conversion of L-serine into ethanolamine by the serine decarboxylase, encoded by sdc from Arabidopsis thaliana, is disclosed in particular in patent application WO2007/144364, which is incorporated by reference herein. Preferably, these enzymes are optimized by mutating the encoding genes in order to improve their conversion efficiency of L-serine into ethanolamine.

[1014] In one embodiment of the disclosure, the serine decarboxylase activity is obtained by evolving enzymes in order to modify their substrate specificity and/or their catalytic efficiency to obtain an enzyme which exhibits specificity for serine and improved activity of serine decarboxylase. These enzymes are selected among the group of enzymes having the same type of catalytic activity on substrates chemically similar to ethanolamine. These enzymes are encoded by genes chosen among a list of genes well known in the art, including but not limited to the genes listed here: GAD1 or SPE1 from Saccharomyces cerevisiae; panD from Aquifex aeolicus or from Bacillus subtilis; GAD or GAD2 or GAD3 or GAD4 or GAD5 from Arabidopsis thaliana; GAD or GAD2 or OAZ1 or ODC1 from Bos Taurus; gadA or gadB or panD or speC or speF from Escherichia coli; SCC105.13 from Streptomyces coelicolor gadB from Mannheimia succiniciproducens; bdb from Haloferax volcanii; odc1 from Lactobacillus sp.; OAZ1 or ODC1 from Bos Taurus; speC or speF from Escherichia coil; SPE1 from Saccharomyces cerevisiae. Any polypeptide having at least 90% sequence identity to any of the polypeptides encoded by those genes may be used.

[1015] Evolution of these enzymes is carried out by means and methods well known by one skilled in the art in order to obtain enzymes having improved specificity for the substrate L-serine and enabling to convert it into ethanolamine with an improved activity. The selection of the evolved enzyme is performed by expressing the evolved enzyme in the microorganism of the invention or in vitro with L-serine as substrate and by quantifying the product ethanolamine.

[1016] The second reaction of conversion of ethanolamine into aminoacetaldehyde is catalysed by an ethanolamine dehydrogenase enzyme. Natural enzymes having this activity are not disclosed in prior art; however some enzymes have low catalytic activity. Therefore it is advantageous to evolve these enzymes with low catalytic activity towards evolved enzymes with improved activity. Useful enzymes can also be obtained by screening metagenomic libraries.

[1017] In one embodiment of the disclosure, the ethanolamine dehydrogenase activity is obtained by evolving enzymes in order to modify their substrate specificity and/or their catalytic efficiency to obtain an enzyme which exhibits specificity for ethanolamine and activity of ethanolamine dehydrogenase. These enzymes are selected among the group of enzymes having the same type of catalytic activity on substrates chemically similar to ethanolamine. These enzymes are encoded by genes chosen among a list of genes well known in the art, including but not limited to the genes listed here: mmsB from Pseudomonas putida, or from Synechococcus PCC6301, or from Bacillus cereus; hibdh from Pseudomonas putida E23; PA0743 from Pseudomonas aeruginosa; ydfG from Escherichia coli or from Bacillus brevis or from Bacillus subtilis; sdh from Agrobacterium tumefaciens; hibadh from Rattus norvegicus or from Thermus thermophilus HB8; gldA from Escherichia coli or from Leuconostoc citreum or from Symbiobacterium thermophilum; yqhE from Escherichia coil; yafB from Escherichia coli; aladh from Enterobacter aerogenes; air from Leishmania donovani; sakR1 from Synechococcus sp.; yhdN from Bacillus subtilis; ytbE from Bacillus subtilis; yiaY from Escherichia coli; AKR4C9 from Arabidopsis thaliana; fucO from Escherichia coli. Any polypeptide having at least 90% sequence identity to any of the polypeptides encoded by these genes may be used. Preferably genes fucO from Escherichia coli or yiaY from Escherichia coli are used for obtaining the ethanolamine dehydrogenase activity.

[1018] Evolution of these enzymes is carried out by means and methods well known by one skilled in the art in order to obtain enzymes having improved specificity for the substrate ethanolamine and/or enabling to convert it into aminoacetaldehyde with an improved activity. The selection of evolved enzymes is done by expressing the evolved enzymes in the microorganism of the invention or in vitro with ethanolamine as substrate and by quantifying the product aminoacetaldehyde.

[1019] The last reaction of conversion of aminoacetaldehyde into ethylenediamine is catalysed by an aminoacetaldehyde transaminase. This enzyme is not encountered naturally. Therefore it is obtained by evolution of known enzyme or by screening metagenomic libraries. In one embodiment of the disclosure, the aminoacetaldehyde transaminase activity is performed with an evolved transaminase or aminotransferase which catalyses the exchange of an amino group of one molecule with an oxo group on another molecule. Preferably, the evolved aminotransferase is chosen among phosphoserine aminotransferase or aspartate aminotransferase or glutamate aminotransferase. More preferably the evolved aminotransferase is chosen among aminotransferase using glutamate as amino group donor. These enzymes are encoded by genes chosen among a list of genes well known in the art, including but not limited to the genes listed here: serC from Escherichia coli or from Bacillus subtilis or from Corynebacterium glutamicum; GOT1 from Sus scrofa; patA from Escherichia coli; ygjG from Brucella canis; rocD from Rhizobium NGR 234 or from Streptomyces avermitilis; SCO1284 from Streptomyces coelicolor AGT or AGT2 or AGT3 or GGT1 from Arabidopsis thaliana; AGXT from Bos taurus. Any polypeptide having at least 90% sequence identity to any of the polypeptides encoded by these genes may be used. Preferably, genes serC from Escherichia coli or GOT1 from Sus scrofa are used.

[1020] Evolution of these enzymes is carried out by means and methods well known by one skilled in the art in order to obtain enzymes having improved specificity for the substrate aminoacetaldehyde and/or enabling to convert it into ethylenediamine with an improved activity. The selection of the evolved enzyme is done by expressing the evolved enzyme in the microorganism of the invention or in vitro with aminoacetaldehyde as substrate and by detecting the product ethylenediamine.

[1021] In another embodiment of the disclosure, aminoacetaldehyde transaminase enzymes can be isolated from strains growing on ethylenediamine as sole carbon and nitrogen source. For this purpose enrichment cultures from environmental samples on ethylenediamine are cultivated on minimal medium with ethylenediamine as sole nitrogen and carbon source. Metagenomic libraries are generated from these cultures and screened for the presence of aminoacetaldehyde transaminase enzymes. This approach allows isolating the gene corresponding to the enzymatic activity and is well-known to the expert in the field.

[1022] According to a specific aspect of the disclosure, the microorganism from embodiment [Z] is engineered to overexpress: an sdc gene from Arabidopsis thaliana, encoding a serine decarboxylase; and/or fucO or yiaY genes from Escherichia coli, encoding for the ethanolamine dehydrogenase activity; and/or an evolved serC gene or GOT1 gene, encoding for aminoacetaldehyde transaminase activity.

[1023] [AA] In one embodiment, the application relates to a recombinant microorganism capable of co-producing monoethylene glycol (MEG) (or glycolic acid) and ethylenediamine (EDA), from one or more pentose and/or hexose sugars and a nitrogen source, wherein the recombinant microorganism from embodiment [A], from embodiment [B], or from embodiment [C] (and optionally comprising embodiment [D]), and having additionally embodiment [E] for production of MEG in a C2 pathway, further expresses one or more of the following from (a) to (c):

[1024] (a) at least one endogenous or exogenous nucleic acid molecule encoding an enzyme having serine hydroxymethyltransferase activity that catalyzes the conversion of L-serine to glycine;

[1025] (b) at least one endogenous or exogenous nucleic acid molecule encoding an enzyme having aldehyde oxidase activity that catalyzes the conversion of glycine from (a) to aminoacetaldehyde;

[1026] (c) at least one endogenous or exogenous nucleic acid molecule encoding an enzyme having aminoacetaldehyde transaminase activity that catalyzes the conversion of aminoacetaldehyde from (b) to EDA;

wherein MEG and EDA are co-produced.

[1027] Preferably gene glyA from Escherichia coli is used for obtaining the serine hydroxymethyltransferase activity.

[1028] The aldehyde oxidase enzyme is obtained by evolving enzymes in order to modify their substrate specificity and/or their catalytic efficiency to obtain an enzyme which exhibits specificity for glycine and activity of aldehyde oxidase. These enzymes are selected among the group of enzymes having the same type of catalytic activity on substrates chemically similar to glycine. These enzymes are encoded by genes chosen among a list of genes well known in the art, including but not limited to the genes listed here: aldH1 from Aquifex aeolicus; dhaS from Anoxybacillus flavithermus; Aldh from Apis mellifera; aldX, aldY, dhaS, ycbD, yfmT or ywdH from Bacillus subtilis; prr from Escherichia coli; ALD2, ALD3, ALD4, ALD5, ALD6 from Saccharomyces cerevisiae; betB from Roseobacter denitrificans; AAur_0650 from Arthrobacter aurescens. Any polypeptide having at least 90% sequence identity to any of the polypeptides encoded by these genes may be used.

[1029] Conversion of aminoacetaldehyde into ethylenediamine by an enzyme having aminoacetaldehyde transaminase activity. This enzyme is obtained by evolving enzymes in order to modify their substrate specificity and/or their catalytic efficiency to obtain an enzyme which exhibits specificity for aminoacetaldehyde and activity of transaminase. These enzymes are selected among the group of enzymes having the same type of catalytic activity on substrates chemically similar to aminoacetaldehyde. These enzymes are encoded by genes chosen among a list of genes well known in the art, including but not limited to the genes listed here: serC from Escherichia coli or from Bacillus subtilis or from Corynebacterium glutamicum; GOT1 from Sus scrofa; patA from Escherichia coli; ygjG from Brucella canis; rocD from Rhizobium NGR 234 or from Streptomyces avermitilis; SCO1284 from Streptomyces coelicolor AGT or AGT2 or AGT3 or GGT1 from Arabidopsis thaliana; AGXT from Bos taurus. Any polypeptide having at least 90% sequence identity to any of the polypeptides encoded by these genes may be used.

[1030] According to a specific aspect of the disclosure, the microorganism from embodiment [AA] is engineered to overexpress an evolved serC gene or GOT1 gene, encoding for aminoacetaldehyde transaminase activity.

[1031] [BB] In one embodiment, the application relates to a recombinant microorganism capable of co-producing monoethylene glycol (MEG) (or glycolic acid) and ethylenediamine (EDA), from one or more pentose and/or hexose sugars and a nitrogen source, wherein the recombinant microorganism from embodiment [A], from embodiment [B], or from embodiment [C] (and optionally comprising embodiment [D]), and having additionally embodiment [E] for production of MEG in a C2 pathway, further expresses one or more of the following from (a) to (e):

[1032] (a) at least one endogenous or exogenous nucleic acid molecule encoding an enzyme having an amino acid N-acetyl transferase activity or O-acetyl transferase activity that catalyzes the conversion of L-serine to N-acetylserine;

[1033] (b) at least one endogenous or exogenous nucleic acid molecule encoding an enzyme having N-acetylserine dehydrogenase activity that catalyzes the conversion of N-acetylserine from (a) to N-acetylmalonate semialdehyde;

[1034] (c) at least one endogenous or exogenous nucleic acid molecule encoding an enzyme having transaminase activity that catalyzes the conversion of N-acetylmalonate semialdehyde from (b) to acetylaminopropanoate;

[1035] (d) at least one endogenous or exogenous nucleic acid molecule encoding an enzyme having deacetylase activity that catalyzes the conversion of acetylaminopropanoate from (c) to 2,3-diaminopropanoate;

[1036] (e) at least one endogenous or exogenous nucleic acid molecule encoding an enzyme having 2,3-diaminopropanoate decarboxylase activity that catalyzes the conversion of 2,3-diaminopropanoate from (d) to EDA;

wherein MEG and EDA are co-produced.

[1037] The first conversion step of embodiment [BB] may be an amino acid N-acetyl transferase activity or O-acetyl transferase activity, since the transformation of O to N is spontaneous. Preferably gene argA from Escherichia coli is used for obtaining the amino acid N-acetyl transferase activity.

[1038] An enzyme having N-acetylserine dehydrogenase activity is obtained by evolving enzymes in order to modify their substrate specificity and/or their catalytic efficiency to obtain an enzyme which exhibits specificity for N-acetylserine and activity of N-acetylserine dehydrogenase. These enzymes are selected among the group of enzymes having the same type of catalytic activity on substrates chemically similar to N-acetylserine. These enzymes are encoded by genes chosen among a list of genes well known in the art, including but not limited to the genes listed here: mmsB from Pseudomonas putida, or from Synechococcus PCC6301, or from Bacillus cereus; hibdh from Pseudomonas putida E23; PA0743 from Pseudomonas aeruginosa; ydfG from Escherichia coli or from Bacillus brevis or from Bacillus subtilis; sdh from Agrobacterium tumefaciens; hibadh from Rattus norvegicus or from Thermus thermophilus HB8; gldA from Escherichia coli or from Leuconostoc citreum or from Symbiobacterium thermophilum; yqhE from Escherichia coli; yafB from Escherichia coli; aladh from Enterobacter aerogenes; air from Leishmania donovani; sakR1 from Synechococcus sp.; yhdN from Bacillus subtilis; ytbE from Bacillus subtilis; yiaY from Escherichia coli; AKR4C9 from Arabidopsis thaliana; fucO from Escherichia coli. Any polypeptide having at least 90% sequence identity to any of the polypeptides encoded by these genes may be used.

[1039] An enzyme having a transaminase activity to convert N-acetylmalonate semialdehyde to acetylaminopropanoate may be obtained by evolving enzymes in order to modify their substrate specificity and/or their catalytic efficiency to obtain an enzyme which exhibits specificity for N-acetylmalonate semialdehyde and activity of N-acetylmalonate semialdehyde transaminase. These enzymes are selected among the group of enzymes having the same type of catalytic activity on substrates chemically similar to N-acetylmalonate semialdehyde. These enzymes are encoded by genes chosen among a list of genes well known in the art, including but not limited to the genes listed here: serC from Escherichia coli or from Bacillus subtilis or from Corynebacterium glutamicum; GOT1 from Sus scrofa; patA from Escherichia coli; ygjG from Brucella canis; rocD from Rhizobium NGR 234 or from Streptomyces avermitilis; 2SCG18.31c from Streptomyces coelicolor, AGT or AGT2 or AGT3 or GGT1 from Arabidopsis thaliana; AGXT from Bos taurus. Any polypeptide having at least 90% sequence identity to any of the polypeptides encoded by these genes may be used.

[1040] Preferably gene argE from Escherichia coli is used for obtaining the deacetylase activity to convert acetylaminopropanoate into 2,3-diaminopropanoate.

[1041] An enzyme having amino-acid decarboxylase activity or keto acid decarboxylase activity to convert 2,3-diaminopropanoate into ethylenediamine may be obtained by evolving enzymes in order to modify their substrate specificity and/or their catalytic efficiency to obtain an enzyme which exhibits specificity for 2,3-diaminopropanoate and activity of amino acid decarboxylase or keto acid decarboxylase. These enzymes are selected among the group of enzymes having the same type of catalytic activity on substrates chemically similar to 2,3-diaminopropanoate. These enzymes are encoded by gene chosen among a list of genes well known in the art, including but not limited to the genes listed here: sdc from Arabidopsis thaliana; padC or yclB from Bacillus subtilis; ubiD from Campylobacter jejuni or from Escherichia coli; PAD1 or GAD1 or SPE1 from Saccharomyces cerevisiae; panD from Aquifex aeolicus or from Bacillus subtilis; GAD or GAD2 or GAD3 or GAD4 or GAD5 from Arabidopsis thaliana; GAD or GAD2 or OAZ1 or ODC1 from Bos Taurus; gadA or gadB or panD or speC or speF from Escherichia coli; SCC105.13 from Streptomyces coelicolor gadB from Mannheimia succiniciproducens; bdb from Haloferax volcanii; odc1 from Lactobacillus sp.; kivD from Lactococcus lactis subsp. Lactis; kdcA from Lactococcus lactis; OAZ1 or ODC1 from Bos Taurus; speC or speF from Escherichia coli; SPE1 from Saccharomyces cerevisiae. Any polypeptide having at least 90% sequence identity to any of the polypeptides encoded by these genes may be used.

[1042] In a further embodiment of the disclosure, the method is performed with a microorganism wherein serine biosynthesis is optimized. This optimization is disclosed in particular in patent application WO 2007/144346, which is incorporated by reference herein.

[1043] Alternatively, in another embodiment, EDA can be produced by the following process: Ser can be directly aminated to (S)-2,3-diaminopropanoate by serine aminase (EC 2.6.1.-), then decarboxylated to EDA, for instance by an enzyme from the family of L-2,4-diaminobutyrate or ornithine decarboxylases (FIG. 7). However, if such an enzyme with (S)-2,3-diaminopropanoate decarboxylase activity is not specific, it may also act on other amino acids or serine itself.

[1044] In some embodiments, EDA can be produced by the following process: the intermediate (S)-2,3-diaminopropanoate may also be produced by direct amination of pyruvate using (S)-2,3-diaminopropanoate ammonia lyase (EC 4.3.1.15) (FIG. 7):

2,3-diaminopropanoate+H2O↔2NH₃+pyruvate

[1045] In some embodiments, the production of MEG and EDA is very close to the thermodynamic maximum yield potential using the lossless conversion of one or more pentose and/or hexose sugars to D-ribose-5-phosphate intermediate, followed by the conversion of the D-ribose-5-phosphate intermediate to glycolaldehyde and D-glyceraldehyde-3-phosphate (G3P) intermediates, and then followed by the co-production of MEG via reduction of glycolaldehyde and EDA via one or more C3 pathways from the G3P intermediate. In some embodiments, the thermodynamic yield potential is 14% better for co-production of MEG and EDA via the pathways disclosed in the present application compared to production of EDA made from glucose by natural or published similar pathways.

[1046] Co-production: (pentose or hexose)+2 NH₃->MEG+EDA+0 ATP*

[1047] Y(pathway)=(0.337+0.326) g/g=0.663 g(MEG+EDA)/g((pentose or hexose)+2NH₃), 97% of Y(max)(heat of combustion)=0.687 g/g

[1048] Standard pathway: glucose+4 NH₃->2 EDA+2 NADH+0 ATP

[1049] Y(pathway)=0.484 g(EDA)/g(glucose+4NH₃), 85% of Y(max)(heat of combustion)=0.571 g/g

[1050] *Passive or H+ symport transport of D-xylose, a pentose, is assumed. Indirect ATP consumption for a H+ symporter or ATP required for cell maintenance are not accounted for.

[1051] [CC] In one embodiment, the application relates to a recombinant microorganism capable of co-producing monoethylene glycol (MEG) (or glycolic acid) and ethylenediamine (EDA), from one or more pentose and/or hexose sugars and a nitrogen source, wherein the recombinant microorganism from embodiment [A], from embodiment [B], or from embodiment [C] (and optionally comprising embodiment [D]), and having additionally embodiment [E] for production of MEG in a C2 pathway, further expresses one or more of the following from (a) to (b):

[1052] (a) at least one endogenous or exogenous nucleic acid molecule encoding an enzyme having a serine aminase activity that catalyzes the conversion of L-serine to (S)-2,3-diaminopropanoate;

[1053] (b) at least one endogenous or exogenous nucleic acid molecule encoding an enzyme having an (S)-2,3-diaminopropanoate decarboxylase activity that catalyzes the conversion of (S)-2,3-diaminopropanoate from (a) to EDA;

wherein MEG and EDA are co-produced.

[1054] [DD] In one embodiment, the application relates to a recombinant microorganism capable of co-producing monoethylene glycol (MEG) (or glycolic acid) and ethylenediamine (EDA), from one or more pentose and/or hexose sugars and a nitrogen source, wherein the recombinant microorganism from embodiment [A], from embodiment [B], or from embodiment [C] (and optionally comprising embodiment [D]), and having additionally embodiment [E] for production of MEG in a C2 pathway, further expresses one or more of the following from (a) to (b):

[1055] (a) at least one endogenous or exogenous nucleic acid molecule encoding an enzyme having an (S)-2,3-diaminopropanoate ammonia lyase activity that catalyzes the conversion of pyruvate and ammonium to (S)-2,3-diaminopropanoate;

[1056] (b) at least one endogenous or exogenous nucleic acid molecule encoding an enzyme having (S)-2,3-diaminopropanoate decarboxylase activity that catalyzes the conversion of (S)-2,3-diaminopropanoate from (a) to EDA;

wherein G3P is converted to pyruvate via endogenous glycolysis in the recombinant microorganism, and wherein MEG and EDA are co-produced.

[1057] In some embodiments, an enzyme having 2,3-diaminopropionate ammonia-lyase activity is used to convert pyruvate and ammonium to (S)-2,3-diaminopropanoate. In some embodiments, an enzyme having 2,3-diaminopropionate ammonia-lyase activity is encoded by an amino acid sequence having at least 70% sequence identity, having at least 80% sequence identity, or having at least 90% sequence identity to E. coli 2,3-diaminopropionate ammonia-lyase ygeX. In other embodiments, the enzyme having 2,3-diaminopropionate ammonia-lyase activity is E. coli ygeX. In some embodiments, the one or more nucleic acid molecule encoding an enzyme having 2,3-diaminopropionate ammonia-lyase activity comprises an amino acid sequence set forth in UniProt ID P66899. In further embodiments, the one or more nucleic acid molecule encoding an enzyme having 2,3-diaminopropionate ammonia-lyase activity is encoded by a nucleic acid sequence set forth in Gene ID 947012.

[1058] In one embodiment of any aspect disclosed above, the enzyme having glycolaldehyde reductase activity is encoded by one or more nucleic acid molecules obtained from a microorganism selected from E. coli and S. cerevisiae. In another embodiment, the one or more nucleic acid molecules is selected from gldA, GRE2, GRE3, yqhD, ydjG, fucO, yafB (dkgB), and/or yqhE (dkgA), or homolog thereof. In another embodiment, the one or more nucleic acid molecules is yqhD. In some embodiments, the yqhD comprises a G149E mutation. In a further embodiment, the enzyme having glycolaldehyde reductase activity comprises an amino acid sequence selected from the group consisting of SEQ ID NOs: 13, 15, 17, 20, 23, 25, 28, 30 and 32. In yet a further embodiment, the enzyme having glycolaldehyde reductase activity is encoded by a nucleic acid sequence selected from the group consisting of SEQ ID NOs: 12, 14, 16, 18, 19, 21, 22, 24, 26, 27, 29 and 31.

[1059] In one embodiment of any aspect disclosed above, the enzyme having thiolase or acetyl coenzyme A acetyltransferase activity is encoded by one or more nucleic acid molecules obtained from a microorganism selected from the group consisting of Clostridium sp., Bacillus sp., E. coli, Saccharomyces sp. and Marinobacter sp. In some embodiments, the enzyme having thiolase or acetyl coenzyme A acetyltransferase activity is encoded by one or more nucleic acid molecules obtained from a microorganism selected from the group consisting of Clostridium acetobutylicum, Clostridium thermosaccharolyticum, Bacillus cereus, E. coli, Saccharomyces cerevisiae and Marinobacter hydrocarbonoclasticus. In some embodiments, the one or more nucleic acid molecules is thlA, atoB and/or ERG10, or homolog thereof. In a further embodiment, the enzyme having thiolase or acetyl coenzyme A acetyltransferase activity comprises an amino acid sequence selected from the group consisting of SEQ ID NOs: 35, 37 and 40. In yet a further embodiment, the enzyme having thiolase or acetyl coenzyme A acetyltransferase activity is encoded by a nucleic acid sequence selected from the group consisting of SEQ ID NOs: 33, 34, 36, 38 and 39.

[1060] In one embodiment of any aspect disclosed above, the enzyme having acetyl-CoA:acetoacetate-CoA transferase or acetate:acetoacetyl-CoA hydrolase activity is encoded by one or more nucleic acid molecules obtained from a microorganism selected from Clostridium sp. and E. coli. In another embodiment, the enzyme having acetyl-CoA:acetoacetate-CoA transferase or acetate:acetoacetyl-CoA hydrolase activity is encoded by one or more nucleic acid molecules obtained from E. coli. In some embodiments, the one or more nucleic acid molecules encoding the enzyme having acetyl-CoA:acetoacetate-CoA transferase activity is atoA and/or atoD, or homolog thereof. In another embodiment, the enzyme having acetyl-CoA:acetoacetate-CoA transferase or acetate:acetoacetyl-CoA hydrolase activity is encoded by one or more nucleic acid molecules obtained from Clostridium acetobutylicum. In some embodiments, the one or more nucleic acid molecules encoding the enzyme having acetate:acetoacetyl-CoA hydrolase activity is ctfA and/or ctfB, or homolog thereof. In a further embodiment, the enzyme having acetyl-CoA:acetoacetate-CoA transferase or acetate:acetoacetyl-CoA hydrolase activity comprises an amino acid sequence selected from the group consisting of SEQ ID NOs: 43, 46, 97, 99, 101 and 103. In yet a further embodiment, the enzyme having acetyl-CoA:acetoacetate-CoA transferase or acetate:acetoacetyl-CoA hydrolase activity is encoded by a nucleic acid sequence selected from the group consisting of SEQ ID NOs: 41, 42, 44, 45, 96, 98, 100 and 102.

[1061] In one embodiment of any aspect disclosed above, the enzyme having acetoacetate decarboxylase activity is encoded by one or more nucleic acid molecules obtained from a microorganism selected from the group consisting of Clostridium sp., Bacillus sp., Chromobacterium sp. and Pseudomonas sp. In another embodiment, the enzyme having acetoacetate decarboxylase activity is encoded by one or more nucleic acid molecules obtained from a microorganism selected from the group consisting of Clostridium acetobutylicum, Clostridium beijerinckii, Clostridium cellulolyticum, Bacillus polymyxa, Chromobacterium violaceum and Pseudomonas putida. In some embodiments, the one or more nucleic acid molecules encoding the enzyme having acetoacetate decarboxylase activity is adc, or homolog thereof. In a further embodiment, the enzyme having acetoacetate decarboxylase activity comprises an amino acid sequence selected from the group consisting of SEQ ID NOs: 49 and 52. In yet another embodiment, the enzyme having acetoacetate decarboxylase activity is encoded by a nucleic acid sequence selected from the group consisting of SEQ ID NOs: 47, 48, 50 and 51.

[1062] [EE] In another embodiment, the recombinant microorganism selected from embodiment [D] or embodiment [E], optionally further comprises one or more modifications selected from the group consisting of:

[1063] (i) a deletion, insertion, or loss of function mutation in a gene encoding a glycolaldehyde reductase that catalyzes the conversion of glycolaldehyde to monoethyleneglycol (MEG);

[1064] (ii) a deletion, insertion, or loss of function mutation in a gene encoding a glycolaldehyde dehydrogenase that catalyzes the conversion of glycolaldehyde to glycolic acid; and

[1065] (iii) a deletion, insertion, or loss of function mutation in a gene encoding a lactate dehydrogenase that catalyzes the conversion of pyruvate to lactate.

[1066] In some embodiments, a recombinant microorganism producing glycolic acid comprises a deletion, insertion, or loss of function mutation in a gene encoding an enzyme having glycolaldehyde reductase activity to prevent the conversion of glycolaldehyde to monoethyleneglycol (MEG) and instead shunt the reaction toward conversion of glycolaldehyde to glycolic acid (GA). In some embodiments, the enzyme having glycolaldehyde reductase activity is from Escherichia coli. In some embodiments, the enzyme having glycolaldehyde reductase activity is encoded by the fucO gene, or homolog thereof.

[1067] In some embodiments, a recombinant microorganism producing MEG (or glycolic acid) or, MEG and one or more co-products, comprises a deletion, insertion, or loss of function mutation in a gene encoding a glycolaldehyde dehydrogenase to prevent the production of glycolic acid from glycolaldehyde and instead shunt the reaction toward conversion of glycolaldehyde to MEG. In some embodiments, the glycolaldehyde dehydrogenase is from Escherichia coli. In some embodiments, the glycolaldehyde dehydrogenase is encoded by the aldA gene, or homolog thereof. In some embodiments, the deletion, insertion, or loss of function mutation in a gene encoding a glycolaldehyde dehydrogenase is partial, wherein some glycolaldehyde dehydrogenase function is still present and an amount of glycolic acid is still produced.

[1068] In some embodiments, a recombinant microorganism producing MEG (or glycolic acid) or, optionally, MEG (or glycolic acid) and one or more co-products, comprises a deletion, insertion, or loss of function mutation in a gene encoding a lactate dehydrogenase to prevent the production of lactate from pyruvate and instead shunt the reaction toward production of one or more co-products. In some embodiments, the lactate dehydrogenase is from Escherichia coli. In some embodiments, the lactate dehydrogenase is encoded by the IdhA gene, or homolog thereof.

[1069] Non-limiting combinations of any of the recombinant microorganism and methods embodiments described herein are included as part of this disclosure.

### Recombinant Microorganism

[1070] The disclosure provides microorganisms that can be engineered to express various endogenous or exogenous enzymes.

[1071] In various embodiments described herein, the recombinant microorganism is a eukaryotic microorganism. In some embodiments, the eukaryotic microorganism is a yeast. In exemplary embodiments, the yeast is a member of a genus selected from the group consisting of Yarrowia, Candida, Saccharomyces, Pichia, Hansenula, Kluyveromyces, Issatchenkia, Zygosaccharomyces, Debaryomyces, Schizosaccharomyces, Pachysolen, Cryptococcus, Trichosporon, Rhodotorula, and Myxozyma.

[1072] In some embodiments, the recombinant microorganism is a prokaryotic microorganism. In exemplary embodiments, the prokaryotic microorganism is a member of a genus selected from the group consisting of Escherichia, Clostridium, Zymomonas, Salmonella, Rhodococcus, Pseudomonas, Bacillus, Lactobacillus, Enterococcus, Alcaligenes, Klebsiella, Paenibacillus, Arthrobacter, Corynebacterium, and Brevibacterium.

[1073] In some embodiments, the recombinant microorganism is used to produce monoethylene glycol (MEG) or glycolic acid (GA), or MEG and one or more co-product, disclosed herein.

[1074] Accordingly, in another aspect, the present inventions provide a method of producing MEG or GA, or MEG and one or more co-product, using a recombinant microorganism described herein. In one embodiment, the method comprises cultivating the recombinant microorganism in a culture medium containing a feedstock providing a carbon source until MEG or GA, or MEG and one or more co-product, is produced. In a further embodiment, the MEG or GA, or MEG and one or more co-product, is recovered. Recovery can be by methods known in the art, such as distillation, membrane-based separation gas stripping, solvent extraction, and expanded bed adsorption.

[1075] In some embodiments, the feedstock comprises a carbon source. In various embodiments described herein, the carbon source may be selected from sugars, glycerol, alcohols, organic acids, alkanes, fatty acids, lignocellulose, proteins, carbon dioxide, and carbon monoxide. In an exemplary embodiment, the carbon source is a sugar. In some embodiments, the sugar comprises one or more pentose and/or hexose sugar. In other embodiments, the one or more pentose and/or hexose sugars are comprised of monomers, oligomers, or a combination thereof. In a further exemplary embodiment, the sugar is glucose or oligomers of glucose thereof. In other embodiments, the oligomers of glucose are selected from fructose, sucrose, starch, cellobiose, maltose, lactose and cellulose. In yet further embodiments, the sugars comprise D-xylose, D-galactose, D-mannose, D-arabinose, L-arabinose, D-fructose, or a combination thereof.

Methods of Producing a Recombinant Microorganism that Produces or Accumulates MEG (or Glycolic Acid), or MEG and One or More Co-Product

[1076] In another aspect, the application provides for a method of producing one or more products derived from glyceraldehyde-3-phosphate (G3P) and glycolaldehyde using a recombinant microorganism of any of the above embodiments, wherein the method comprises cultivating the recombinant microorganism in a culture medium containing one or more pentose and/or hexose sugars providing a carbon source until the one or more products derived from glyceraldehyde-3-phosphate (G3P) and glycolaldehyde are produced. In some embodiments, the recombinant microorganism co-produces monoethylene glycol (MEG) and one or more co-products. In further embodiments, the one or more co-products are selected from acetone, isopropanol, propene, L-serine, glycine, monoethanolamine (MEA), ethylenediamine (EDA), or a combination thereof. In yet further embodiments, the one or more product is selected from monoethylene glycol (MEG) and glycolic acid (GA).

[1077] In yet another aspect, the application provides for a method of producing a recombinant microorganism that produces or accumulates one or more products derived from glyceraldehyde-3-phosphate (G3P) and glycolaldehyde from one or more pentose and/or hexose sugars via a pentose-phosphate intermediate, wherein the pentose-phosphate intermediate is D-ribose-5-phosphate, D-ribulose-5-phosphate or D-xylulose-5-phosphate, comprising: introducing into or expressing in the recombinant microorganism one or more enzyme for the conversion of the one or more pentose and/or hexose sugars to the pentose-phosphate intermediate; introducing into or expressing in the recombinant microorganism one or more enzyme for the conversion of the D-ribose-5-phosphate intermediate to G3P and glycolaldehyde; introducing into or expressing in the recombinant microorganism one or more enzyme for the production of the one or more products from glycolaldehyde in a C2 pathway; and introducing into or expressing in the recombinant microorganism one or more enzymes for the production of the one or more products from G3P in one or more C3 pathways; and culturing the recombinant microorganism in a culture medium containing the one or more pentose and/or hexose sugars to produce or accumulate the one or more products. In some embodiments, the recombinant microorganism co-produces monoethylene glycol (MEG) and one or more co-products. In further embodiments, the one or more co-products are selected from acetone, isopropanol, propene, L-serine, glycine, monoethanolamine (MEA), ethylenediamine (EDA), or a combination thereof. In yet further embodiments, the one or more product is selected from monoethylene glycol (MEG) and glycolic acid (GA). In some embodiments, the glycolaldehyde is oxidized to GA by a glycolaldehyde dehydrogenase.

[1078] In one embodiment, the application relates to a method of producing a recombinant microorganism that produces or accumulates one or more products derived from glyceraldehyde-3-phosphate (G3P) and glycolaldehyde from one or more pentose and/or hexose sugars via a pentose-phosphate intermediate, comprising: introducing into or expressing in the recombinant microorganism at least one enzyme having an activity that converts one or more pentose and/or hexose sugars in a lossless conversion pentose-phosphate intermediate and comprising at least one enzyme having a pentose-phosphate aldolase activity, wherein the enzyme has D-ribose-5-phosphate aldolase activity, D-ribulose-5-phosphate aldolase activity, or D-xylulose-5-phosphate aldolase activity, that converts the D-ribose-5-phosphate intermediate to glycolaldehyde and D-glyceraldehyde-3-phosphage (G3P).

[1079] In some embodiments, the method comprises introducing into or expressing in the recombinant microorganism at least one enzyme having transketolase activity and expression of at least one enzyme having D-ribose-5-phosphate aldolase activity. In some embodiments, the enzyme having transketolase activity is encoded by an amino acid sequence having at least 70% sequence identity, at least 80% sequence identity, or at least 90% sequence identity to tktA from E. coli. In other embodiments, the enzyme having transketolase activity is tktA from E. coli. In some embodiments, the enzyme having transketolase activity is encoded by an amino acid sequence having at least 70% sequence identity at least 80% sequence identity, or at least 90% sequence identity to tktB from E. coli. In other embodiments, the enzyme having transketolase activity is tktB from E. coli. In another embodiment, the one or more nucleic acid molecules encoding the enzyme having transketolase activity comprises an amino acid sequence selected from the group consisting of SEQ ID NOs: 148 and 150. In some embodiments, the one or more nucleic acid molecules encoding the enzyme having transketolase activity is tktA, or homolog thereof. In some embodiments, the one or more nucleic acid molecules encoding the enzyme having transketolase activity is tktB, or homolog thereof. In a further embodiment, the one or more nucleic acid molecule encoding the enzyme having transketolase activity is encoded by a nucleic acid sequence selected from the group consisting of SEQ ID NOs: 147 and 149. In some embodiments, the enzyme having D-ribose-5-phosphate aldolase activity is encoded by an amino acid sequence having at least 70% sequence identity, at least 80% sequence identity, or at least 90% sequence identity to deoC from E. coli. In other embodiments, the enzyme having D-ribose-5-phosphate aldolase activity is deoC from E. coli.

[1080] In some embodiments, the method comprises introducing into or expressing in the recombinant microorganism at least one enzyme having transaldolase activity. In some embodiments, the enzyme having transaldolase activity is encoded by an amino acid sequence having at least 70% sequence identity, at least 80% sequence identity, or at least 90% sequence identity to talA or talB from E. coli. In some embodiments, the enzyme having transaldolase activity is talA from E. coli. In other embodiments, the enzyme having transaldolase activity is talB from E. coli. In another embodiment, the one or more nucleic acid molecules encoding the enzyme having transaldolase activity comprises an amino acid sequence selected from the group consisting of SEQ ID NOs: 152 and 154. In a further embodiment, the one or more nucleic acid molecule encoding the enzyme having transaldolase activity is encoded by a nucleic acid sequence selected from the group consisting of SEQ ID NOs: 151 and 153.

[1081] In some embodiments, the method comprises introducing into or expressing in the recombinant microorganism at least one enzyme having ribulose-5-phosphate 3-epimerase activity. In some embodiments, the enzyme having ribulose-5-phosphate 3-epimerase activity is encoded by an amino acid sequence having at least 70% sequence identity, at least 80% sequence identity, or at least 90% sequence identity to rpe from E. coli. In other embodiments, the enzyme having ribulose-5-phosphate 3-epimerase activity is rpe from E. coli. In another embodiment, the one or more nucleic acid molecules encoding the enzyme having ribulose-5-phosphate 3-epimerase activity comprise an amino acid sequence set forth in SEQ ID NO: 158. In a further embodiment, the one or more nucleic acid molecule encoding the enzyme having ribulose-5-phosphate 3-epimerase activity is encoded by a nucleic acid sequence set forth in SEQ ID NO: 157.

[1082] In some embodiments, the method comprises introducing into or expressing in the recombinant microorganism at least one enzyme having ribose-5-phosphate isomerase activity. In some embodiments, the enzyme having ribose-5-phosphate isomerase activity is encoded by an amino acid sequence having at least 70% sequence identity, at least 80% sequence identity, or at least 90% sequence identity to rpiA from E. coli. In other embodiments, the enzyme having ribose-5-phosphate isomerase activity is rpiA from E. coli. In other embodiments, the enzyme having ribose-5-phosphate isomerase activity is encoded by an amino acid sequence having at least 70% sequence identity, at least 80% sequence identity, or at least 90% sequence identity to rpiB from E. coli. In other embodiments, the enzyme having ribose-5-phosphate isomerase activity is rpiB from E. coli. In another embodiment, the one or more nucleic acid molecules encoding enzyme having ribose-5-phosphate isomerase activity comprise an amino acid sequence set forth in SEQ ID NO: 156. In a further embodiment, the one or more nucleic acid molecule encoding the enzyme having ribose-5-phosphate isomerase activity is encoded by a nucleic acid sequence set forth in SEQ ID NO: 155.

[1083] In some embodiments, the method comprises introducing into or expressing in the recombinant microorganism at least one enzyme having an activity selected from a transketolase activity, a transaldolase activity, a ribulose-5-phosphate 3-epimerase activity, a ribose-5-phosphate isomerase activity and a D-ribose-5-phosphate aldolase activity. In other embodiments, the method further comprises introducing into the recombinant microorganism one or more modifications to diminish or delete activity in one or more endogenous enzymes selected from glyceraldehyde 3-phosphate dehydrogenase, phosphoglycerate kinase and phosphoglycerate kinase and phosphoglycerate mutase. In some embodiments, the endogenous glyceraldehyde 3-phosphate dehydrogenase enzyme is gapA, the phosphoglycerate kinase is pgk and the phosphoglycerate mutase is gpmA or gpmM.

[1084] In some embodiments, the method comprises introducing into or expressing in the recombinant microorganism at least one enzyme having fructose-6-phosphate phosphoketolase activity. In some embodiments, an enzyme having fructose-6-phosphate phosphoketolase activity is encoded by an amino acid sequence having at least 70% sequence identity, at least 80% sequence identity, or at least 90% sequence identity to an enzyme having fructose-6-phosphate phosphoketolase activity selected from the group consisting of Bifidobacterium dentium BDP_1006, Bifidobacterium lactis xfp, Lactobacillus paraplantarum xpkA and Bifidobacterium breve xfp. In a preferred embodiment, an enzyme having fructose-6-phosphate phosphoketolase activity is selected from the group consisting of Bifidobacterium dentium BDP_1006, Bifidobacterium lactis xfp, Lactobacillus paraplantarum xpkA and Bifidobacterium breve xfp. In another embodiment, the one or more nucleic acid molecules encoding the enzyme having fructose-6-phosphate phosphoketolase activity comprise an amino acid sequence selected from the group consisting of SEQ ID NOs: 212, 214, 216 and 218. In a further embodiment, the one or more nucleic acid molecule encoding the enzyme having fructose-6-phosphate phosphoketolase activity is encoded by a nucleic acid sequence selected from the group consisting of SEQ ID NOs: 211, 213, 215 and 217.

[1085] In some embodiments, the method comprises introducing into or expressing in the recombinant microorganism at least one enzyme having phosphate acetyltransferase activity. In some embodiments, an enzyme having phosphate acetyltransferase activity is encoded by an amino acid sequence having at least 70% sequence identity, at least 80% sequence identity, or at least 90% sequence identity to an enzyme having phosphate acetyltransferase activity selected from E. coli pta and Clostridium acetobutylicum pta. In a preferred embodiment, an enzyme having phosphate acetyltransferase activity is selected from E. coli pta and Clostridium acetobutylicum pta. In another embodiment, the one or more nucleic acid molecules encoding the enzyme having phosphate acetyltransferase activity comprise an amino acid sequence selected from SEQ ID NOs: 220 and 222. In a further embodiment, the one or more nucleic acid molecule encoding the enzyme having phosphate acetyltransferase activity is encoded by a nucleic acid sequence selected from SEQ ID NOs: 219 and 221.

[1086] In some embodiments, the method comprises introducing into or expressing in the recombinant microorganism at least one enzyme having an activity selected from a fructose-6-phosphate phosphoketolase activity, a phosphate acetyltransferase activity, a transketolase activity, a transaldolase activity, a ribulose-5-phosphate 3-epimerase activity, a ribose-5-phosphate isomerase activity and a D-ribose-5-phosphate aldolase activity. In other embodiments, the method further comprises introducing into the recombinant microorganism one or more modifications to diminish or delete activity in an endogenous 6-phosphofructokinase enzyme. In some embodiments, the endogenous 6-phosphofructokinase enzyme is pfkA and/or pfkB.

[1087] In some embodiments, the one or more pentose and/or hexose sugars comprise D-xylose and the method further comprises introducing into or expressing in the recombinant microorganism at least one enzyme having xylose isomerase activity and expression of at least one enzyme having xylulose 5-kinase activity. In some embodiments, the at least one enzyme having xylose isomerase activity is encoded by an amino acid sequence having at least 70% sequence identity, at least 80% sequence identity, or at least 90% sequence identity to xylA from E. coli or Pyromyces sp. In a preferred embodiment, an enzyme having xylose isomerase activity is selected from E. coli xylA and Pyromyces sp xylA. In yet another embodiment, the one or more nucleic acid molecules encoding the xylose isomerase comprises an amino acid sequence selected from SEQ ID NOs: 95 and 144. In a further embodiment, the one or more nucleic acid molecules encoding the xylose isomerase is encoded by a nucleic acid sequence selected from the group consisting of SEQ ID NOs: 93, 94 and 143. In some embodiments, the at least one enzyme having xylulose 5-kinase activity is encoded by an amino acid sequence having at least 70% sequence identity, at least 80% sequence identity, or at least 90% sequence identity to xylB from E. coli. In a preferred embodiment, an enzyme having xylulose 5-kinase activity is E. coli xylB. In another embodiment, the one or more nucleic acid molecules encoding the D-xylulose 5-kinase comprises an amino acid sequence set forth in SEQ ID NO: 146. In a further embodiment, the one or more nucleic acid molecules encoding the D-xylulose 5-kinase is encoded by a nucleic acid sequence set forth in SEQ ID NO: 145.

[1088] In some embodiments, the one or more pentose and/or hexose sugars comprise D-fructose and the method further comprises introducing into or expressing in the recombinant microorganism at least one enzyme having fructose 1,6-bisphosphatase activity. In one embodiment, the at least one enzyme having fructose 1,6-bisphosphatase activity is encoded by an amino acid sequence having at least 70% sequence identity, at least 80% sequence identity, or at least 90% sequence identity to fbp from E. coli. In a preferred embodiment, an enzyme having fructose 1,6-bisphosphatase activity is E. coli fbp. In some embodiments, the enzyme having fructose 1,6-bisphosphatase activity converts D-fructose 1,6-bisphosphate to D-fructose 6-phosphate. In other embodiments, D-fructose is converted to fructose 1,6-bisphoshate by endogenous enzymes in the recombinant microorganism.

[1089] In some embodiments of any of the methods described above, the method further comprises introducing into the recombinant microorganism one or more modifications to diminish or delete activity in one or more endogenous enzymes selected from glucose 6-phosphate-1-dehydrogenase, 6-phosphogluconolactonase, and 6-phosphogluconate dehydrogenase. In further embodiments, the glucose 6-phosphate-1-dehydrogenase is zwf, the 6-phosphogluconolactonase is pgl, and the 6-phosphogluconate dehydrogenase is gnd.

[1090] In some embodiments, the one or more pentose and/or hexose sugars are capable of being converted to one or more intermediate in the non-oxidative pentose phosphate pathway of the recombinant microorganism. In other embodiments, the one or more pentose and/or hexose sugars are comprised of monomers, oligomers, or a combination thereof.

[1091] In some embodiments, the expression of at least one enzyme having transketolase activity and/or fructose-6-phosphate phosphoketolase activity and the expression of at least one enzyme having pentose-phosphate aldolase activity enables a lossless conversion of one or more pentose and/or hexose sugars to pentose-phosphate intermediates and the subsequent conversion of pentose-phosphate to G3P and glycolaldehyde.

[1092] In some embodiments, the methods allow for the production of MEG or glycolic acid (GA) through the conversion of glycolaldehyde in a C2 pathway and through the conversion of G3P in one or more C3 pathways. In some embodiments, MEG is produced by the reduction of glycolaldehyde by an enzyme having glycolaldehyde reductase activity in a C2 pathway. In other embodiments, GA is produced by the oxidation of glycolaldehyde by an enzyme having glycolaldehyde dehydrogenase activity in a C2 pathway.

[1093] In some embodiments, the at least one enzyme for the production of MEG or GA are selected from at least one enzyme having an activity selected from a 3-phosphoglycerate dehydrogenase activity, a phosphoserine aminotransferase activity, a serine transaminase activity, a 3-phosphohydroxypyruvate phosphatase activity, a phosphoserine phosphatase activity, a hydroxypyruvate decarboxylase activity, a 3-phosphohydroxypyruvate reductase activity, a glycolaldehyde reductase activity, a glycolaldehyde dehydrogenase activity, a serine oxidoreductase (deaminating) or serine-pyruvate aminotransferase activity, a serine decarboxylase activity, an ethanolamine aminotransferase or ethanolamine oxidoreductase (deaminating) activity, a glycerate decarboxylase activity, a hydroxypyruvate reductase activity, a 3-phosphoglycerate phosphatase activity, a 2-phosphoglycerate phosphatase activity, a glycerate 3-kinase activity, a glycerate 2-kinase activity, and a glyoxylate reductase activity.

[1094] In some embodiments, the methods allow for the production of MEG through the conversion of glycolaldehyde in a C2 pathway and for the production of one or more co-product through the conversion of G3P in one or more C3 pathways. In other embodiments, the one or more co-product is selected from acetone, isopropanol, propene, isobutene and one or more serine pathway compounds. In some preferred embodiments, the one or more serine pathway compounds is selected from serine, glycine, monoethanolamine (MEA) and ethylenediamine (EDA).

[1095] In some embodiments, the at least one enzyme for the production of one or more co-product through the conversion of G3P in one or more C3 pathways are selected from at least one enzyme having an activity selected from a thiolase or acetyl coenzyme A acetyltransferase activity, an acetyl-CoA:acetoacetate transferase or acetate:acetoacetyl-CoA hydrolase activity, and an acetoacetate decarboxylase activity, and the one or more co-product comprises acetone.

[1096] In some embodiments, the at least one enzyme for the production of one or more co-product through the conversion of G3P in one or more C3 pathways are selected from at least one enzyme having an activity selected from a thiolase or acetyl coenzyme A acetyltransferase activity, an acetyl-CoA:acetoacetate transferase or acetate:acetoacetyl-CoA hydrolase activity, an acetoacetate decarboxylase activity, and a secondary alcohol dehydrogenase activity, and the one or more co-product comprises isopropanol.

[1097] In some embodiments, the at least one enzyme for the production of one or more co-product through the conversion of G3P in one or more C3 pathways are selected from at least one enzyme having an activity selected from a thiolase or acetyl coenzyme A acetyltransferase activity, an acetyl-CoA:acetoacetate transferase or acetate:acetoacetyl-CoA hydrolase activity, an acetoacetate decarboxylase activity, a secondary alcohol dehydrogenase activity, and a dehydratase activity, and the one or more co-product comprises propene.

[1098] In some embodiments, the at least one enzyme for the production of one or more co-product through the conversion of G3P in one or more C3 pathways are selected from at least one enzyme having an activity selected from a thiolase or acetyl coenzyme A acetyltransferase activity, an acetyl-CoA:acetoacetate transferase or acetate:acetoacetyl-CoA hydrolase activity, an acetoacetate decarboxylase activity, a 3-hydroxyisovalerate (3HIV) synthase activity, a hydroxymethylglutaryl-CoA synthase activity, a methylglutaconyl-CoA hydratase activity, a methylcrotonyl-CoA carboxylase activity, a methylcrotonyl-CoA hydratase activity, a 3-hydroxyisovaleryl-CoA thioesterase activity, a 3HIV kinase activity, a 3HIV-3-phosphate decarboxylase activity, and a 3HIV decarboxylase activity, and the one or more co-product comprises isobutene.

[1099] In some embodiments, the at least one enzyme for the production of one or more co-product through the conversion of G3P in one or more C3 pathways are selected from at least one enzyme having an activity selected from a 3-phosphoglycerate dehydrogenase activity, a phosphoserine aminotransferase activity, a 3-phosphohydroxypyruvate phosphatase activity, a phosphoserine phosphatase activity, a serine oxidoreductase (deaminating) or serine-pyruvate aminotransferase activity, a hydroxypyruvate reductase activity, a 3-phosphoglycerate phosphatase activity, a 2-phosphoglycerate phosphatase activity, a glycerate 3-kinase activity, and a glycerate 2-kinase activity, and the one or more co-product comprises L-serine.

[1100] In some embodiments, the at least one enzyme for the production of one or more co-product through the conversion of G3P in one or more C3 pathways are selected from at least one enzyme having an activity selected from a serine hydroxymethyltransferase activity, a transferase activity, a formaldehyde dehydrogenase activity, a formate dehydrogenase activity, an activity associated with glycine cleavage system, a 3-phosphoglycerate dehydrogenase activity, a phosphoserine aminotransferase activity, a 3-phosphohydroxypyruvate phosphatase activity, a phosphoserine phosphatase activity, a serine transaminase activity, a hydroxypyruvate decarboxylase activity, a serine oxidoreductase (deaminating) activity, a serine decarboxylase activity, an ethanolamine aminotransferase or ethanolamine oxidoreductase (deaminating) activity, a hydroxypyruvate reductase activity, a 3-phosphoglycerate phosphatase activity, a 2-phosphoglycerate phosphatase activity, a glycerate 3-kinase activity, a glycerate 2-kinase activity, a glycolaldehyde dehydrogenase activity, a glycolate dehydrogenase activity, an alanine-glyoxylate aminotransferase activity, an alanine transaminase activity, an NAD(P)H dependent glutamate dehydrogenase activity, and the one or more co-product comprises glycine. In another embodiment, the activity associated with glycine cleavage system comprise an enzyme or protein selected from a glycine decarboxylase (P protein), an aminomethyltransferase (T protein), a dihydrolipoamide dehydrogenase (L protein), and an H protein.

[1101] In some embodiments, the at least one enzyme for the production of one or more co-product through the conversion of G3P in one or more C3 pathways are selected from at least one enzyme having an activity selected from a 3-phosphoglycerate dehydrogenase activity, a 3-phosphoserine aminotransferase activity, a 3-phosphohydroxypyruvate phosphatase activity, a phosphoserine phosphatase activity, a transaminase activity, a hydroxypyruvate decarboxylase activity, a serine oxidoreductase (deaminating) or serine-pyruvate aminotransferase activity, a serine decarboxylase activity, a hydroxypyruvate reductase activity, a 3-phosphoglycerate phosphatase activity, a 2-phosphoglycerate phosphatase activity, a glycerate 3-kinase activity, a glycerate 2-kinase activity, an acetaldehyde dehydrogenase activity, and an ethanolamine ammonia lyase activity, and the one or more co-product comprises monoethanolamine (MEA).

[1102] In some embodiments, the at least one enzyme for the production of one or more co-product through the conversion of G3P in one or more C3 pathways are selected from at least one enzyme having an activity selected from a serine dehydrogenase activity, a 2-aminomalonate semialdehyde decarboxylase activity, an aminoacetaldehyde transaminase activity, a 2-aminomalonate semialdehyde transaminase activity, a 2,3-diaminopropanoate decarboxylase activity, a serine decarboxylase activity, an ethanolamine dehydrogenase activity, a serine hydroxymethyltransferase activity, an aldehyde oxidase activity, an N-acetyl transferase or O-acetyl transferase activity, an N-acetylserine dehydrogenase activity, a transaminase activity, a deacetylase activity, a serine aminase activity, and a 2,3-diaminopropanoate ammonia lyase activity, and the one or more co-product comprises ethylenediamine (EDA).

[1103] In some embodiments of any of the methods described above, the method further comprises introducing into the recombinant microorganism one or more modifications to diminish or delete activity in a glycolaldehyde reductase, a glycolaldehyde dehydrogenase, a lactate dehydrogenase, or combination thereof.

[1104] In one embodiment, at least a portion of the excess NADH produced in the C3 pathway is used as a source of reducing equivalents in the C2 pathway. In another embodiment, at least a portion of the excess NADH produced in the C3 pathway is used to produce ATP.

[1105] In one embodiment, excess biomass formation is minimized and production of MEG or glycolic acid or MEG and one or more co-products is maximized.

[1106] Pentose and/or Hexose Sugars to Pentose-Phosphate Intermediate and Subsequent Conversion of Pentose-Phosphate Intermediate to Glycolaldehyde and D-Glyceraldehyde 3-Phosphate

[1107] In the present disclosure, pentose and/or hexose sugars are converted into pentose-phosphate, an intermediate of the non-oxidative pentose phosphate pathway, wherein the pentose-phosphate intermediate is D-ribose-5-phosphate, D-ribulose-5-phosphate or D-xylulose-5-phosphate. The pentose-phosphate intermediate then serves as a substrate for a pentose-phosphate aldolase, wherein the aldolase has D-ribose-5-phosphate aldolase activity, D-ribulose-5-phosphate aldolase activity, or D-xylulose-5-phosphate aldolase activity to produce glycolaldehyde and D-glyceraldehyde 3-phosphate, compounds which can then be further converted to MEG or GA, or MEG and one or more co-products.

[1108] [mA] Therefore, in one embodiment, the application relates to a method of producing a recombinant microorganism capable of producing glycolaldehyde and D-glyceraldehyde 3-phosphate (G3P) via a pentose-phosphate intermediate from one or more pentose and/or hexose sugars, wherein the method comprises introducing into or expressing in the recombinant microorganism one or more of the following from (a) to (h):

[1109] (a) at least one endogenous or exogenous nucleic acid molecule encoding an enzyme having transketolase activity that catalyzes a reversible conversion of D-fructose-6-phosphate and D-glyceraldehyde-3-phosphate to D-erythrose-4-phosphate and D-xylulose-5-phosphate, respectively, and/or that catalyzes a reversible conversion of D-glyceraldehyde-3-phosphate from (b) and D-seduheptulose-7-phosphate from (b) to D-ribose-5-phosphate and D-xylulose-5-phosphate, respectively;

[1110] (b) at least one endogenous or exogenous nucleic acid molecule encoding an enzyme having transaldolase activity that catalyzes a reversible conversion of D-fructose-6-phosphate and D-erythrose-4-phosphate from (a) to D-glyceraldehyde-3-phosphate and D-seduheptulose-7-phosphate, respectively;

[1111] (c) at least one endogenous or exogenous nucleic acid molecule encoding an enzyme having ribulose-5-phosphate 3-epimerase activity that catalyzes an interconversion of D-xylulose-5-phosphate from (a) and/or (f) and D-ribulose-5-phosphate;

[1112] (d) at least one endogenous or exogenous nucleic acid molecule encoding an enzyme having ribose-5-phosphate isomerase activity that catalyzes an interconversion of D-ribulose-5-phosphate from (c) and D-ribose-5-phosphate;

[1113] (e) at least one endogenous or exogenous nucleic acid molecule encoding an enzyme having xylose isomerase activity that catalyzes the conversion of D-xylose to D-xylulose;

[1114] (f) at least one endogenous or exogenous nucleic acid molecule encoding an enzyme having xylulose 5-kinase activity that catalyzes the conversion of D-xylulose to D-xylulose-5-phosphate;

[1115] (g) at least one endogenous or exogenous nucleic acid molecule encoding an enzyme having fructose 1,6-bisphosphatase activity that catalyzes the conversion of D-fructose 1,6-bisphosphate to D-fructose 6-phosphate;

[1116] (h) at least one endogenous or exogenous nucleic acid molecule encoding an enzyme having D-ribose 5-phosphate aldolase activity that catalyzes the conversion of D-ribose-5-phosphate from (a) and/or (d) to glycolaldehyde and D-glyceraldehyde-3-phosphate;

wherein the method optionally further comprises introducing a deletion, insertion, or loss of function mutation in a gene encoding a glyceraldehyde 3-phosphate dehydrogenase, a phosphoglycerate kinase and/or a phosphoglycerate mutase;
wherein the one or more pentose and/or hexose sugars are capable of being converted to one or more intermediate in the non-oxidative pentose phosphate pathway of the recombinant microorganism, and wherein glycolaldehyde and D-glyceraldehyde 3-phosphate (G3P) are produced.

[1117] [mB] In another embodiment, the application relates to a method of producing a recombinant microorganism capable of producing glycolaldehyde and D-glyceraldehyde 3-phosphate (G3P) via a pentose-phosphate intermediate from one or more pentose and/or hexose sugars, wherein the method comprises introducing into or expressing in the recombinant microorganism one or more of the following from (a) to (j):

[1118] (a) at least one endogenous or exogenous nucleic acid molecule encoding an enzyme having fructose-6-phosphate phosphoketolase activity that catalyzes a reversible conversion of D-fructose-6-phosphate to D-erythrose-4-phosphate and acetyl-phosphate;

[1119] (b) at least one endogenous or exogenous nucleic acid molecule encoding an enzyme having phosphate acetyltransferase activity that catalyzes a reversible conversion of acetyl-phosphate from (a) to acetyl-CoA;

[1120] (c) at least one endogenous or exogenous nucleic acid molecule encoding an enzyme having transaldolase activity that catalyzes a reversible conversion of D-fructose-6-phosphate and D-erythrose-4-phosphate from (a) to D-glyceraldehyde-3-phosphate and D-seduheptulose-7-phosphate, respectively;

[1121] (d) at least one endogenous or exogenous nucleic acid molecule encoding an enzyme having transketolase activity that catalyzes a reversible conversion of D-glyceraldehyde-3-phosphate from (c) and D-seduheptulose-7-phosphate from (c) to D-ribose-5-phosphate and D-xylulose-5-phosphate, respectively;

[1122] (e) at least one endogenous or exogenous nucleic acid molecule encoding an enzyme having ribulose-5-phosphate 3-epimerase activity that catalyzes an interconversion of D-xylulose-5-phosphate from (d) and/or (h) and D-ribulose-5-phosphate;

[1123] (f) at least one endogenous or exogenous nucleic acid molecule encoding an enzyme having ribose-5-phosphate isomerase activity that catalyzes an interconversion of D-ribulose-5-phosphate from (e) and D-ribose-5-phosphate;

[1124] (g) at least one endogenous or exogenous nucleic acid molecule encoding an enzyme having xylose isomerase activity that catalyzes the conversion of D-xylose to D-xylulose;

[1125] (h) at least one endogenous or exogenous nucleic acid molecule encoding an enzyme having xylulose 5-kinase activity that catalyzes the conversion of D-xylulose to D-xylulose-5-phosphate;

[1126] (i) at least one endogenous or exogenous nucleic acid molecule encoding an enzyme having fructose 1,6-bisphosphatase activity that catalyzes the conversion of D-fructose 1,6-bisphosphate to D-fructose 6-phosphate;

[1127] (j) at least one endogenous or exogenous nucleic acid molecule encoding an enzyme having D-ribose 5-phosphate aldolase activity that catalyzes the conversion of D-ribose-5-phosphate from (d) and/or (f) to glycolaldehyde and D-glyceraldehyde-3-phosphate;

wherein the method optionally further comprises introducing a deletion, insertion, or loss of function mutation in a gene encoding a 6-phosphofructokinase;
wherein the one or more pentose and/or hexose sugars are capable of being converted to one or more intermediate in the non-oxidative pentose phosphate pathway of the recombinant microorganism,
wherein the acetyl-CoA produced in step (b) can be used to produce one or more co-products selected from glycolic acid, acetone, isopropanol, propene, isobutene, and one or more serine pathway compounds;
and wherein glycolaldehyde and D-glyceraldehyde 3-phosphate (G3P) are produced.

[1128] In some embodiments, the oxidative branch of the pentose phosphate pathway is deleted or inactivated to optimize flux of sugars towards the non-oxidative entry into the pentose phosphate pathway.

[1129] [mC] Therefore, in one embodiment, the method of embodiment [mA] or embodiment [mB] optionally further comprises introducing one or more modifications selected from the group consisting of:

[1130] (i) a deletion, insertion, or loss of function mutation in a gene encoding a glucose 6-phosphate-1-dehydrogenase that catalyzes the conversion of glucose-6-phosphate to 6-phospho-D-glucono-1,5-lactone;

[1131] (ii) a deletion, insertion, or loss of function mutation in a gene encoding a 6-phosphogluconolactonase that catalyzes the conversion of 6-phospho-D-glucono-1,5-lactone to gluconate-6-phosphate; and

[1132] (iii) a deletion, insertion, or loss of function mutation in a gene encoding a 6-phosphogluconate dehydrogenase that catalyzes the conversion of gluconate-6-phosphate to D-ribulose-5-phosphate.

[1133] MEG or Glycolic Acid, or MEG and Co-Product Production Pathways

[1134] In some embodiments, the glycolaldehyde and glyceraldehyde-3-phosphate intermediates produced from embodiment [mA] or from embodiment [mB] (and optionally comprising embodiment [mC]) are used in known MEG (or glycolic acid) C2 production pathways, which are coupled to C3 pathways, as described below, to co-produce additional MEG (or glycolic acid) and/or one or more co-products.

[1135] In some embodiments, MEG is produced via a C2 pathway that uses an enzyme having glycolaldehyde reductase activity to convert glycolaldehyde to MEG. In another embodiment, glycolic acid (GA) is produced via a C2 pathway that uses an enzyme having glycolaldehyde dehydrogenase activity to oxidize glycolaldehyde to GA.

[1136] [mD] In one embodiment, the application relates to a method of producing a recombinant microorganism capable of producing monoethylene glycol (MEG) from one or more pentose and/or hexose sugars, wherein the method of embodiment [mA] or embodiment [mB] (and optionally comprising embodiment [mC]), further comprises introducing into or expressing in the recombinant microorganism: at least one endogenous or exogenous nucleic acid molecule encoding an enzyme having glycolaldehyde reductase activity that catalyzes the conversion of glycolaldehyde to MEG, wherein the recombinant microorganism optionally further comprises a deletion, insertion, or loss of function mutation in a gene encoding a glycolaldehyde dehydrogenase, and wherein MEG is produced.

[1137] [mE] In one embodiment, the application relates to a method of producing a recombinant microorganism capable of producing glycolic acid (GA) from one or more pentose and/or hexose sugars, wherein the method of embodiment [mA] or embodiment [mB] (and optionally comprising embodiment [mC]), further comprises introducing into or expressing in the recombinant microorganism: at least one endogenous or exogenous nucleic acid molecule encoding an enzyme having glycolaldehyde dehydrogenase activity that catalyzes the conversion of glycolaldehyde to GA, wherein the recombinant microorganism optionally further comprises a deletion, insertion, or loss of function mutation in a gene encoding a glycolaldehyde reductase, and wherein GA is produced.

[1138] Production of MEG (or Glycolic Acid) Via a C2 Pathway and MEG (or Glycolic Acid) Via a C3 Pathway

[1139] In one aspect, MEG (or glycolic acid) is produced from one or more pentose and/or hexose sugars by the lossless transformation of the one or more pentose and/or hexose sugars to pentose-phosphate intermediate, followed by a conversion of the pentose-phosphate intermediate to glycolaldehyde and G3P intermediates, followed by a conversion of the glycolaldehyde intermediate to MEG (or glycolic acid) via a C2 pathway, and a conversion of G3P to MEG (or glycolic acid) via a C3 pathway. Wherein the pentose-phosphate intermediate is D-ribose-5-phosphate, D-ribulose-5-phosphate or D-xylulose-5-phosphate.

[1140] In some embodiments, the application relates to a method of producing a recombinant microorganism capable of producing MEG (or glycolic acid) from one or more pentose and/or hexose sugars, wherein the method of embodiment [mA] or embodiment [mB] (and optionally comprising embodiment [mC]), and having additionally embodiment [mD] or embodiment [mE] for production of MEG (or glycolic acid) in a C2 pathway, further comprises one or more C3 biosynthesis pathway for the production of MEG (or glycolic acid).

[1141] [mK] In one embodiment, the application relates to a method of producing a recombinant microorganism capable of producing monoethylene glycol (MEG) (or glycolic acid) from one or more pentose and/or hexose sugars and a nitrogen source, wherein the method of embodiment [mA] or embodiment [mB] (and optionally comprising embodiment [mC]), and having additionally embodiment [mD] or embodiment [mE] for production of MEG (or glycolic acid) in a C2 pathway, further comprises introducing into or expressing in the recombinant microorganism one or more of the following from (a) to (h):

[1142] (a) at least one endogenous or exogenous nucleic acid molecule encoding an enzyme having 3-phosphoglycerate dehydrogenase activity that catalyzes the conversion of 3-phosphoglycerate to 3-phosphohydroxypyruvate;

[1143] (b) at least one endogenous or exogenous nucleic acid molecule encoding an enzyme having phosphoserine aminotransferase activity that catalyzes the conversion of 3-phosphohydroxypyruvate from (a) to phospho-L-serine;

[1144] (c) at least one endogenous or exogenous nucleic acid molecule encoding an enzyme having 3-phosphohydroxypyruvate phosphatase activity that catalyzes the conversion of 3-phosphohydroxypyruvate from (a) to hydroxypyruvate;

[1145] (d) at least one endogenous or exogenous nucleic acid molecule encoding an enzyme having phosphoserine phosphatase activity that catalyzes the conversion of phospho-L-serine from (b) to L-serine;

[1146] (e) at least one endogenous or exogenous nucleic acid molecule encoding an enzyme having L-serine transaminase or serine oxidase activity that catalyzes the conversion of L-serine from (d) to hydroxypyruvate;

[1147] (f) at least one endogenous or exogenous nucleic acid molecule encoding an enzyme having hydroxypyruvate decarboxylase activity that catalyzes the conversion of hydroxypyruvate from (c) or (e) to glycolaldehyde;

[1148] (g) at least one endogenous or exogenous nucleic acid molecule encoding an enzyme having glycolaldehyde reductase activity that catalyzes the conversion of glycolaldehyde from (f) to MEG;

[1149] (h) at least one endogenous or exogenous nucleic acid molecule encoding an enzyme having glycolaldehyde dehydrogenase activity that catalyzes the conversion of glycolaldehyde from (f) to glycolic acid;

wherein the produced intermediate G3P from embodiment [mA] or from embodiment [mB] is converted to 3-phosphoglycerate through endogenous glycolysis in the recombinant microorganism, and wherein MEG (or glycolic acid) is produced.

[1150] [mL] In one embodiment, the application relates to a method of producing a recombinant microorganism capable of producing monoethylene glycol (MEG) (or glycolic acid) from one or more pentose and/or hexose sugars and a nitrogen source, wherein the method of embodiment [mA] or embodiment [mB] (and optionally comprising embodiment [mC]), and having additionally embodiment [mD] or embodiment [mE] for production of MEG (or glycolic acid) in a C2 pathway, further comprises introducing into or expressing in the recombinant microorganism one or more of the following from (a) to (j):

[1151] (a) at least one endogenous or exogenous nucleic acid molecule encoding an enzyme having 2-phosphoglycerate phosphatase activity and/or an enzyme having glycerate-2-kinase activity that catalyzes the conversion of 2-phosphoglycerate to glycerate;

[1152] (b) at least one endogenous or exogenous nucleic acid molecule encoding an enzyme having 3-phosphoglycerate phosphatase activity or an enzyme having glycerate-3-kinase activity that catalyzes the conversion of 3-phosphoglycerate to glycerate;

[1153] (c) at least one endogenous or exogenous nucleic acid molecule encoding an enzyme having hydroxypyruvate reductase activity that catalyzes the conversion of glycerate from (a) and/or (b) to hydroxypyruvate;

[1154] (d) at least one endogenous or exogenous nucleic acid molecule encoding an enzyme having serine aminotransferase activity or an enzyme having serine oxidoreductase (deaminating) activity that catalyzes the conversion of L-serine to hydroxypyruvate;

[1155] (e) at least one endogenous or exogenous nucleic acid molecule encoding an enzyme having L-serine decarboxylase activity that catalyzes the conversion of L-serine to ethanolamine;

[1156] (f) at least one endogenous or exogenous nucleic acid molecule encoding an enzyme having hydroxypyruvate decarboxylase activity that catalyzes the conversion of hydroxypyruvate from (c) and/or (d) to glycolaldehyde;

[1157] (g) at least one endogenous or exogenous nucleic acid molecule encoding an enzyme having ethanolamine aminotransferase or ethanolamine oidoreductase (deaminating) activity that catalyzes the conversion of ethanolamine from (e) to glycolaldehyde;

[1158] (h) at least one endogenous or exogenous nucleic acid molecule encoding an enzyme having glycerate decarboxylase activity that catalyzes the conversion of glycerate from (a) and/or (b) to MEG;

[1159] (i) at least one endogenous or exogenous nucleic acid molecule encoding an enzyme having glycolaldehyde reductase activity that catalyzes the conversion of glycolaldehyde from (f) and/or (g) to MEG;

[1160] (j) at least one endogenous or exogenous nucleic acid molecule encoding an enzyme having glycolaldehyde dehydrogenase activity that catalyzes the conversion of glycolaldehyde from (f) and/or (g) to glycolic acid;

wherein the produced intermediate G3P from embodiment [mA] or from embodiment [mB] is converted to 3-phosphoglycerate and/or 2-phosphoglycerate through endogenous glycolysis in the recombinant microorganism, and wherein MEG (or glycolic acid) is produced.

[1161] In another aspect, MEG is produced from the lossless transformation of one or more pentose and/or hexose sugars to D-ribose-5-phosphate intermediate, followed by a conversion of the D-ribose-5-phosphate intermediate to glycolaldehyde and D-glyceraldehyde-3-phosphate (G3P) intermediates, followed by a conversion of the glycolaldehyde intermediate to MEG via a C2 pathway, and a conversion of G3P intermediate to one or more co-product via a C3 pathway.

[1162] Co-Production of MEG Via a C2 Pathway and Acetone, Isopropanol, Propene and/or Isobutene Via a C3 Pathway

[1163] In some embodiments, MEG is produced from the lossless transformation of one or more pentose and/or hexose sugars to pentose-phosphate intermediate, followed by a conversion of the pentose-phosphate intermediate to glycolaldehyde and D-glyceraldehyde-3-phosphate (G3P) intermediates, followed by a conversion of the glycolaldehyde intermediate to MEG via a C2 pathway, and a conversion of G3P intermediate to acetone via a C3 pathway. Wherein the pentose-phosphate intermediate is D-ribose-5-phosphate, D-ribulose-5-phosphate or D-xylulose-5-phosphate.

[1164] [mM] In one embodiment, the application relates to a method of producing a recombinant microorganism capable of co-producing monoethylene glycol (MEG) and acetone from one or more pentose and/or hexose sugars, wherein the method of embodiment [mA] or embodiment [mB] (and optionally comprising embodiment [mC]), and having additionally embodiment [mD] for production of MEG in a C2 pathway, further comprises introducing into or expressing in the recombinant microorganism one or more of the following from (a) to (c):

[1165] (a) at least one endogenous or exogenous nucleic acid molecule encoding an enzyme having thiolase or acetyl coenzyme A acetyltransferase activity that catalyzes the conversion of acetyl-CoA to acetoacetyl-CoA;

[1166] (b) at least one endogenous or exogenous nucleic acid molecule encoding an enzyme having acetyl-CoA:acetoacetate-CoA transferase activity or an enzyme having acetate:acetoacetyl-CoA hydrolase activity that catalyzes the conversion of acetoacetyl-CoA from (a) to acetoacetate; and/or

[1167] (c) at least one endogenous or exogenous nucleic acid molecule encoding an enzyme having acetoacetate decarboxylase activity that catalyzes the conversion of acetoacetate from (b) to acetone;

wherein the produced intermediate G3P from embodiment [mA] or from embodiment [mB] is converted to acetyl-CoA through endogenous glycolysis in the microorganism, and wherein MEG (or glycolic acid) and acetone are co-produced.

[1168] In some embodiments, MEG is produced from the lossless transformation of one or more pentose and/or hexose sugars to pentose-phosphate intermediate, followed by a conversion of the pentose-phosphate intermediate to glycolaldehyde and D-glyceraldehyde-3-phosphate (G3P) intermediates, followed by a conversion of the glycolaldehyde intermediate to MEG via a C2 pathway, and a conversion of G3P intermediate to isobutene via a C3 pathway. wherein the pentose-phosphate intermediate is D-ribose-5-phosphate, D-ribulose-5-phosphate or D-xylulose-5-phosphate.

[1169] [mN] In some embodiments, the application relates to a method of producing a recombinant microorganism capable of co-producing monoethylene glycol (MEG) and isobutene from one or more pentose and/or hexose sugars, wherein the method of embodiment [mA] or from embodiment [mB] (and optionally comprising embodiment [mC]), and having additionally embodiment [mD] for production of MEG in a C2 pathway, further comprises introducing into or expressing in the recombinant microorganism one or more of the following from (a) to (d):

[1170] (a) at least one endogenous or exogenous nucleic acid molecule encoding an enzyme having thiolase or acetyl coenzyme A acetyltransferase activity that catalyzes the conversion of acetyl-CoA to acetoacetyl-CoA;

[1171] (b) at least one endogenous or exogenous nucleic acid molecule encoding an enzyme having acetyl-CoA:acetoacetate-CoA transferase activity or an enzyme having acetate:acetoacetyl-CoA hydrolase activity that catalyzes the conversion of acetoacetyl-CoA from (a) to acetoacetate;

[1172] (c) at least one endogenous or exogenous nucleic acid molecule encoding an enzyme having acetoacetate decarboxylase activity that catalyzes the conversion of acetoacetate from (b) to acetone;

[1173] (d) at least one endogenous or exogenous nucleic acid molecule encoding an enzyme having 3-hydroxyisovalerate synthase activity that catalyzes the conversion of acetone from (c) and acetyl-CoA to 3-hydroxyisovalerate (3HIV);

[1174] or

wherein the method comprises introducing into or expressing in the recombinant microorganism one or more of the following from (e) to (j):

[1175] (e) at least one endogenous or exogenous nucleic acid molecule encoding an enzyme having thiolase or acetyl coenzyme A acetyltransferase activity that catalyzes the conversion of acetyl-CoA to acetoacetyl-CoA;

[1176] (f) at least one endogenous or exogenous nucleic acid molecule encoding an enzyme having hydroxymethylglutaryl-CoA synthase activity that catalyzes the conversion of acetoacetyl-CoA from (e) and acetyl-CoA to 3-hydroxy-3-methylglutaryl-CoA (HMG-CoA);

[1177] (g) at least one endogenous or exogenous nucleic acid molecule encoding an enzyme having methylglutaconyl-CoA hydratase activity that catalyzes the conversion of HMG-CoA from (f) to 3-methylglutaconyl-CoA;

[1178] (h) at least one endogenous or exogenous nucleic acid molecule encoding an enzyme having methylcrotonyl-CoA carboxylase activity that catalyzes the conversion of 3-methylglutaconyl-CoA from (g) to 3-methylcrotonyl-CoA;

[1179] (i) at least one endogenous or exogenous nucleic acid molecule encoding an enzyme having methylcrotonyl-CoA hydratase activity that catalyzes the conversion of 3-methylcrotonyl-CoA from (h) to 3-hydroxyisovaleryl-CoA;

[1180] (j) at least one endogenous or exogenous nucleic acid molecule encoding an enzyme having 3-hydroxyisovaleryl-CoA thioesterase activity that catalyzes the conversion of 3-hydroxyisovaleryl-CoA from (i) to 3HIV;

wherein the method further comprises introducing into or expressing in the recombinant microorganism (a1) and (a2), and/or (b1) selected from:

[1181] (a1) at least one endogenous or exogenous nucleic acid molecule encoding an enzyme having 3HIV kinase activity that catalyzes the conversion of 3HIV from (d) or (j) to 3HIV-3-phosphate;

[1182] (a2) at least one endogenous or exogenous nucleic acid molecule encoding an enzyme having 3HIV-3-phosphate decarboxylase activity that catalyzes the conversion of 3HIV-3-phosphate from (a1) to isobutene;

[1183] (b1) at least one endogenous or exogenous nucleic acid molecule encoding a an enzyme having 3HIV decarboxylase activity that catalyzes the conversion of 3HIV from (d) or (j) to isobutene;

wherein the produced intermediate G3P from embodiment [mA] or from embodiment [mB] is converted to acetyl-CoA through endogenous glycolysis in the microorganism, and wherein MEG and isobutene are co-produced.

[1184] In some embodiments, MEG is produced from the lossless transformation of one or more pentose and/or hexose sugars to D-ribose-5-phosphate intermediate, followed by a conversion of the D-ribose-5-phosphate intermediate to glycolaldehyde and D-glyceraldehyde-3-phosphate (G3P) intermediates, followed by a conversion of the glycolaldehyde intermediate to MEG via a C2 pathway, and a conversion of G3P intermediate to isopropanol via a C3 pathway.

[1185] [mO] In one embodiment, the methods of embodiments [mM] and/or [mN](optionally comprising embodiment [mEE]), optionally further comprises introducing into or expressing in the recombinant microorganism at least one endogenous or exogenous nucleic acid molecule encoding an enzyme having secondary alcohol dehydrogenase activity that catalyzes the conversion of acetone to isopropanol.

[1186] In some embodiments, MEG is produced from the lossless transformation of one or more pentose and/or hexose sugars to pentose-phosphate intermediate, followed by a conversion of the pentose-phosphate intermediate to glycolaldehyde and D-glyceraldehyde-3-phosphate (G3P) intermediates, followed by a conversion of the glycolaldehyde intermediate to MEG via a C2 pathway, and a conversion of G3P intermediate to propene via a C3 pathway. Wherein the pentose-phosphate intermediate is D-ribose-5-phosphate, D-ribulose-5-phosphate or D-xylulose-5-phosphate.

[1187] [mP] In another embodiment, the method of embodiment [mO] (optionally comprising embodiment [mEE]), optionally further comprises at least one endogenous or exogenous nucleic acid molecule encoding an enzyme having dehydratase activity that catalyzes the conversion of isopropanol to propene.

[1188] Co-Production of MEG Via a C2 Pathway and One or More Serine Pathway Compound Via a C3 Pathway

[1189] In some embodiments, MEG and L-serine are co-produced from the lossless transformation of one or more pentose and/or hexose sugars to pentose-phosphate intermediate, followed by a conversion of the pentose-phosphate intermediate to glycolaldehyde and D-glyceraldehyde-3-phosphate (G3P) intermediates, followed by a conversion of the glycolaldehyde intermediate to MEG via a C2 pathway, and a conversion of G3P intermediate to Lserine via one or more C3 pathways. Wherein the pentose-phosphate intermediate is D-ribose-5-phosphate, D-ribulose-5-phosphate or D-xylulose-5-phosphate.

[1190] [mQ] In one embodiment, the application relates to a method of producing a recombinant microorganism capable of co-producing monoethylene glycol (MEG) and L-serine from one or more pentose and/or hexose sugars and a nitrogen source, wherein the method of embodiment [mA] or embodiment [mB] (and optionally comprising embodiment [mC]), and having additionally embodiment [mD] for production of MEG in a C2 pathway, further comprises introducing into or expressing in the recombinant microorganism one or more of the following from (a) to (h):

[1191] (a) at least one endogenous or exogenous nucleic acid molecule encoding an enzyme having 3-phosphoglycerate dehydrogenase activity that catalyzes the conversion of 3-phosphoglycerate to 3-phosphohydroxypyruvate;

[1192] (b) at least one endogenous or exogenous nucleic acid molecule encoding an enzyme having 3-phosphoglycerate phosphatase activity and/or an enzyme having glycerate 3-kinase activity that catalyzes the conversion of 3-phosphoglycerate to glycerate;

[1193] (c) at least one endogenous or exogenous nucleic acid molecule encoding an enzyme having 2-phosphoglycerate phosphatase activity and/or an enzyme having glycerate 2-kinase activity that catalyzes the conversion of 2-phosphoglycerate to glycerate;

[1194] (d) at least one endogenous or exogenous nucleic acid molecule encoding an enzyme having phosphoserine aminotransferase activity that catalyzes the conversion of 3-phosphohydroxypyruvate from (a) to phospho-L-serine;

[1195] (e) at least one endogenous or exogenous nucleic acid molecule encoding an enzyme having 3-phosphohydroxypyruvate phosphatase activity that catalyzes the conversion of 3-phosphohydroxypyruvate from (a) to hydroxypyruvate;

[1196] (f) at least one endogenous or exogenous nucleic acid molecule encoding an enzyme having phosphoserine phosphatase activity that catalyzes the conversion of phospho-L-serine from (d) to L-serine;

[1197] (g) at least one endogenous or exogenous nucleic acid molecule encoding an enzyme having hydroxypyruvate reductase activity that catalyzes the conversion of glycerate from (b) and/or (c) to hydroxypyruvate;

[1198] (h) at least one endogenous or exogenous nucleic acid molecule encoding an enzyme having serine-pyruvate aminotransferase activity that catalyzes the conversion of hydroxypyruvate from (e) and/or (g) to L-serine;

wherein the produced intermediate G3P from embodiment [mA] or from embodiment [mB] is converted to 3-phosphoglycerate and/or 2-phosphoglycerate through endogenous glycolysis in the microorganism, and wherein MEG and L-serine are produced.

[1199] In some embodiments, MEG and glycine are co-produced from the lossless transformation of one or more pentose and/or hexose sugars to pentose-phosphate intermediate, followed by a conversion of the pentose-phosphate intermediate to glycolaldehyde and D-glyceraldehyde-3-phosphate (G3P) intermediates, followed by a conversion of the glycolaldehyde intermediate to MEG via a C2 pathway, and a conversion of G3P intermediate to glycine via one or more C3 pathways. Wherein the pentose-phosphate intermediate is D-ribose-5-phosphate, D-ribulose-5-phosphate or D-xylulose-5-phosphate.

[1200] [mR] In one embodiment, the application relates to a method of producing a recombinant microorganism capable of co-producing monoethylene glycol (MEG) and glycine from one or more pentose and/or hexose sugars and a nitrogen source, wherein the method of embodiment [mA] or embodiment [mB] (and optionally comprising embodiment [mC]), and having additionally embodiment [mD] for production of MEG in a C2 pathway, further comprises introducing into or expressing in the recombinant microorganism one or more of the following from (a) to (e):

[1201] (a) at least one endogenous or exogenous nucleic acid molecule encoding an enzyme having serine hydroxymethyltransferase activity that catalyzes the conversion of L-serine and tetrahydrofolate (THF) to glycine and 5,10-methylene tetrahydrofolate (M-THF);

[1202] (b) at least one endogenous or exogenous nucleic acid molecule encoding an enzyme having transferase activity that catalyzes the conversion of M-THF from (a) to formaldehyde;

[1203] (c) at least one endogenous or exogenous nucleic acid molecule encoding an enzyme having formaldehyde dehydrogenase activity that catalyzes the conversion of formaldehyde from (b) to formate and NADH;

[1204] (d) at least one endogenous or exogenous nucleic acid molecule encoding an enzyme having formate dehydrogenase activity that catalyzes the conversion of formate from (c) to CO₂ and NADH;

[1205] (e) at least one endogenous or exogenous nucleic acid molecule encoding a protein of the glycine cleavage system that catalyze the conversion of M-THF from (a), CO₂, NH₃ and NADH from (c) or (d) to glycine and THF; wherein THF is reconstituted from steps (b) through (e), wherein optionally formate from (c) is further oxidized to CO₂ and H₂ by a formate hydrogenlyase complex, and wherein MEG and glycine are produced.

[1206] [mS] In one embodiment, the application relates to a method of producing a recombinant microorganism capable of co-producing monoethylene glycol (MEG) and glycine from one or more pentose and/or hexose sugars and a nitrogen source, wherein the recombinant microorganism from embodiment [mA] or from embodiment [mB] (and optionally comprising embodiment [mC]), and having additionally embodiment [mD] for production of MEG in a C2 pathway, further comprises introducing into or expressing in the recombinant microorganism one or more of the following from (a) to (k):

[1207] (a) at least one endogenous or exogenous nucleic acid molecule encoding an enzyme having 3-phosphoglycerate dehydrogenase activity that catalyzes the conversion of 3-phosphoglycerate to 3-phosphohydroxypyruvate;

[1208] (b) at least one endogenous or exogenous nucleic acid molecule encoding an enzyme having phosphoserine aminotransferase activity that catalyzes the conversion of 3-phosphohydroxypyruvate from (a) to phospho-L-serine;

[1209] (c) at least one endogenous or exogenous nucleic acid molecule encoding an enzyme having 3-phosphohydroxypyruvate phosphatase activity that catalyzes the conversion of 3-phosphohydroxypyruvate from (a) to hydroxypyruvate;

[1210] (d) at least one endogenous or exogenous nucleic acid molecule encoding an enzyme having phosphoserine phosphatase activity that catalyzes the conversion of phospho-L-serine from (b) to L-serine;

[1211] (e) at least one endogenous or exogenous nucleic acid molecule encoding an enzyme having L-serine transaminase or serine oxidase activity that catalyzes the conversion of L-serine from (d) to hydroxypyruvate;

[1212] (f) at least one endogenous or exogenous nucleic acid molecule encoding an enzyme having hydroxypyruvate decarboxylase activity that catalyzes the conversion of hydroxypyruvate from (c) or (e) to glycolaldehyde;

[1213] (g) at least one endogenous or exogenous nucleic acid molecule encoding an enzyme having glycolaldehyde dehydrogenase activity that catalyzes the conversion of glycolaldehyde from (f) to glycolic acid;

[1214] (h) at least one endogenous or exogenous nucleic acid molecule encoding an enzyme having glycolate dehydrogenase activity that catalyzes the conversion of glycolic acid from (g) to glyoxylate;

[1215] (i) at least one endogenous or exogenous nucleic acid molecule encoding an enzyme having alanine-glyoxylate aminotransferase activity that catalyzes the conversion of glyoxylate from (h) and alanine to glycine and pyruvate;

[1216] (j) at least one endogenous or exogenous nucleic acid molecule encoding an enzyme having alanine transaminase activity that catalyzes the conversion of pyruvate from (i) and glutamate to alanine and 2-oxoglutarate;

[1217] (k) at least one endogenous or exogenous nucleic acid molecule encoding an enzyme having NAD(P)H dependent glutamate dehydrogenase activity that catalyzes the conversion of 2-oxoglutarate from (j) and ammonia to glutamate;

wherein the produced intermediate G3P from embodiment [mA] or from embodiment [mB] is converted to 3-phosphoglycerate and/or 2-phosphoglycerate through endogenous glycolysis in the microorganism, wherein alanine and glutamate are reconstituted from steps (j) and (k), and wherein MEG and glycine are co-produced.

[1218] [mT] In one embodiment, the application relates to a method of producing a recombinant microorganism capable of co-producing monoethylene glycol (MEG) and glycine from one or more pentose and/or hexose sugars and a nitrogen source, wherein the recombinant microorganism from embodiment [mA] or from embodiment [mB] (and optionally comprising embodiment [mC]), and having additionally embodiment [mD] for production of MEG in a C2 pathway, further comprises introducing into or expressing in the recombinant microorganism one or more of the following from (a) to (l):

[1219] (a) at least one endogenous or exogenous nucleic acid molecule encoding an enzyme having 2-phosphoglycerate phosphatase activity and/or an enzyme having glycerate-2-kinase activity that catalyzes the conversion of 2-phosphoglycerate to glycerate;

[1220] (b) at least one endogenous or exogenous nucleic acid molecule encoding an enzyme having 3-phosphoglycerate phosphatase activity and/or an enzyme having glycerate-3-kinase activity that catalyzes the conversion of 3-phosphoglycerate to glycerate;

[1221] (c) at least one endogenous or exogenous nucleic acid molecule encoding an enzyme having hydroxypyruvate reductase activity that catalyzes the conversion of glycerate from (a) and/or (b) to hydroxypyruvate;

[1222] (d) at least one endogenous or exogenous nucleic acid molecule encoding an enzyme having serine aminotransferase or serine oxidoreductase (deaminating) activity that catalyzes the conversion of L-serine to hydroxypyruvate;

[1223] (e) at least one endogenous or exogenous nucleic acid molecule encoding an enzyme having L-serine decarboxylase activity that catalyzes the conversion of L-serine to ethanolamine;

[1224] (f) at least one endogenous or exogenous nucleic acid molecule encoding an enzyme having hydroxypyruvate decarboxylase activity that catalyzes the conversion of hydroxypyruvate from (c) and/or (d) to glycolaldehyde;

[1225] (g) at least one endogenous or exogenous nucleic acid molecule encoding an enzyme having ethanolamine aminotransferase activity or an enzyme having ethanolamine oidoreductase (deaminating) activity that catalyzes the conversion of ethanolamine from (e) to glycolaldehyde;

[1226] (h) at least one endogenous or exogenous nucleic acid molecule encoding an enzyme having glycolaldehyde dehydrogenase activity that catalyzes the conversion of glycolaldehyde from (f) and/or (g) to glycolic acid;

[1227] (i) at least one endogenous or exogenous nucleic acid molecule encoding an enzyme having glycolate dehydrogenase activity that catalyzes the conversion of glycolic acid from (g) to glyoxylate;

[1228] (j) at least one endogenous or exogenous nucleic acid molecule encoding an enzyme having alanine-glyoxylate aminotransferase activity that catalyzes the conversion of glyoxylate from (i) and alanine to glycine and pyruvate;

[1229] (k) at least one endogenous or exogenous nucleic acid molecule encoding an enzyme having alanine transaminase activity that catalyzes the conversion of pyruvate from (j) and glutamate to alanine and 2-oxoglutarate;

[1230] (l) at least one endogenous or exogenous nucleic acid molecule encoding an enzyme having NAD(P)H dependent glutamate dehydrogenase activity that catalyzes the conversion of 2-oxoglutarate from (k) and ammonia to glutamate; wherein the produced intermediate G3P from embodiment [mA] or from embodiment [mB] is converted to 3-phosphoglycerate and/or 2-phosphoglycerate through endogenous glycolysis in the microorganism, wherein alanine and glutamate are reconstituted from steps (k) and (l), and wherein MEG and glycine are co-produced.

[1231] In some embodiments, MEG and MEA are co-produced from the lossless transformation of one or more pentose and/or hexose sugars to pentose-phosphate intermediate, followed by a conversion of the pentose-phosphate intermediate to glycolaldehyde and D-glyceraldehyde-3-phosphate (G3P) intermediates, followed by a conversion of the glycolaldehyde intermediate to MEG via a C2 pathway, and a conversion of G3P intermediate to MEA via one or more C3 pathways. Wherein the pentose-phosphate intermediate is D-ribose-5-phosphate, D-ribulose-5-phosphate or D-xylulose-5-phosphate.

[1232] [mU] In one embodiment, the application relates to a method of producing a recombinant microorganism capable of co-producing monoethylene glycol (MEG) and MEA from one or more pentose and/or hexose sugars and a nitrogen source, wherein the method of embodiment [mA] or embodiment [mB] (and optionally comprising embodiment [mC]), and having additionally embodiment [mD] for production of MEG in a C2 pathway, further comprises introducing into or expressing in the recombinant microorganism one or more of the following from (a) to (i):

[1233] (a) at least one endogenous or exogenous nucleic acid molecule encoding an enzyme having 3-phosphoglycerate dehydrogenase activity that catalyzes the conversion of 3-phosphoglycerate to 3-phosphohydroxypyruvate;

[1234] (b) at least one endogenous or exogenous nucleic acid molecule encoding an enzyme having 3-phosphoglycerate phosphatase activity and/or an enzyme having glycerate 3-kinase activity that catalyzes the conversion of 3-phosphoglycerate to glycerate;

[1235] (c) at least one endogenous or exogenous nucleic acid molecule encoding an enzyme having 2-phosphoglycerate phosphatase activity and/or an enzyme having glycerate 2-kinase activity that catalyzes the conversion of 2-phosphoglycerate to glycerate;

[1236] (d) at least one endogenous or exogenous nucleic acid molecule encoding an enzyme having phosphoserine aminotransferase activity that catalyzes the conversion of 3-phosphohydroxypyruvate from (a) to phospho-L-serine;

[1237] (e) at least one endogenous or exogenous nucleic acid molecule encoding an enzyme having 3-phosphohydroxypyruvate phosphatase activity that catalyzes the conversion of 3-phosphohydroxypyruvate from (a) to hydroxypyruvate;

[1238] (f) at least one endogenous or exogenous nucleic acid molecule encoding an enzyme having phosphoserine phosphatase activity that catalyzes the conversion of phospho-L-serine from (d) to L-serine;

[1239] (g) at least one endogenous or exogenous nucleic acid molecule encoding an enzyme having hydroxypyruvate reductase activity that catalyzes the conversion of glycerate from (b) and/or (c) to hydroxypyruvate;

[1240] (h) at least one endogenous or exogenous nucleic acid molecule encoding an enzyme having serine-pyruvate aminotransferase activity that catalyzes the conversion of hydroxypyruvate from (e) and/or (g) to L-serine;

[1241] (i) at least one endogenous or exogenous nucleic acid molecule encoding an enzyme having serine decarboxylase activity that catalyzes the conversion of L-serine from (f) and/or (h) to MEA;

wherein the produced intermediate G3P from embodiment [mA] or from embodiment [mB] is converted to 3-phosphoglycerate and/or 2-phosphoglycerate through endogenous glycolysis in the microorganism, and wherein MEG and MEA are co-produced.

[1242] [mV] In one embodiment, the application relates to a method of producing a recombinant microorganism capable of co-producing monoethylene glycol (MEG) and MEA from one or more pentose and/or hexose sugars and a nitrogen source, wherein the method of embodiment [mA] or embodiment [mB] (and optionally comprising embodiment [mC]), and having additionally embodiment [mD] for production of MEG in a C2 pathway, further comprises introducing into or expressing in the recombinant microorganism one or more of the following from (a) to (f):

[1243] (a) at least one endogenous or exogenous nucleic acid molecule encoding an enzyme having 2-phosphoglycerate phosphatase activity and/or an enzyme having glycerate-2-kinase activity that catalyzes the conversion of 2-phosphoglycerate to glycerate;

[1244] (b) at least one endogenous or exogenous nucleic acid molecule encoding an enzyme having 3-phosphoglycerate phosphatase activity and/or an enzyme having glycerate-3-kinase activity that catalyzes the conversion of 3-phosphoglycerate to glycerate;

[1245] (c) at least one endogenous or exogenous nucleic acid molecule encoding an enzyme having hydroxypyruvate reductase activity that catalyzes the conversion of glycerate from (a) and/or (b) to hydroxypyruvate;

[1246] (d) at least one endogenous or exogenous nucleic acid molecule encoding an enzyme having serine-pyruvate aminotransferase or serine oxidoreductase (deaminating) activity that catalyzes the conversion of L-serine to hydroxypyruvate;

[1247] (e) at least one endogenous or exogenous nucleic acid molecule encoding an enzyme having hydroxypyruvate decarboxylase activity that catalyzes the conversion of hydroxypyruvate from (c) and/or (d) to glycolaldehyde;

[1248] (f) at least one endogenous or exogenous nucleic acid molecule encoding an enzyme having transaminase activity that catalyzes the conversion of glycolaldehyde from (e) to MEA;

wherein the produced intermediate G3P from embodiment [mA] or from embodiment [mB] is converted to 3-phosphoglycerate and/or 2-phosphoglycerate through endogenous glycolysis in the microorganism, and wherein MEG and MEA are co-produced.

[1249] [mW] In one embodiment, the application relates to a method of producing a recombinant microorganism capable of co-producing monoethylene glycol (MEG) and MEA from one or more pentose and/or hexose sugars and a nitrogen source, wherein the method of embodiment [mA] or embodiment [mB] (and optionally comprising embodiment [mC]), and having additionally embodiment [mD] for production of MEG in a C2 pathway, further comprises introducing into or expressing in the recombinant microorganism one or more of the following from (a) to (b):

[1250] (a) at least one endogenous or exogenous nucleic acid molecule encoding an enzyme having acetaldehyde dehydrogenase activity that catalyzes the conversion of acetyl-CoA to acetaldehyde;

[1251] (b) at least one endogenous or exogenous nucleic acid molecule encoding an enzyme having ethanolamine ammonia lyase activity that catalyzes the conversion of acetaldehyde and ammonia to MEA;

wherein the produced intermediate G3P from embodiment [mA] or from embodiment [mB] is converted to acetyl-CoA through endogenous glycolysis in the recombinant microorganism, and wherein MEG and MEA are co-produced.

[1252] In some embodiments, MEG and EDA are co-produced from the lossless transformation of one or more pentose and/or hexose sugars to pentose-phosphate intermediate, followed by a conversion of the pentose-phosphate intermediate to glycolaldehyde and D-glyceraldehyde-3-phosphate (G3P) intermediates, followed by a conversion of the glycolaldehyde intermediate to MEG via a C2 pathway, and a conversion of G3P intermediate to EDA via one or more C3 pathways. Wherein the pentose-phosphate intermediate is D-ribose-5-phosphate, D-ribulose-5-phosphate or D-xylulose-5-phosphate.

[1253] [mX] In one embodiment, the application relates to a method of producing a recombinant microorganism capable of co-producing monoethylene glycol (MEG) and ethylenediamine (EDA), from one or more pentose and/or hexose sugars and a nitrogen source, wherein the method of embodiment [mA] or embodiment [mB] (and optionally comprising embodiment [mC]), and having additionally embodiment [mD] for production of MEG in a C2 pathway, further comprises introducing into or expressing in the recombinant microorganism one or more of the following from (a) to (c):

[1254] (a) at least one endogenous or exogenous nucleic acid molecule encoding an enzyme having serine dehydrogenase activity that catalyzes the conversion of L-serine to 2-aminomalonate semialdehyde;

[1255] (b) at least one endogenous or exogenous nucleic acid molecule encoding an enzyme having 2-aminomalonate semialdehyde decarboxylase activity that catalyzes the conversion of 2-aminomalonate semialdehyde from (a) to aminoacetaldehyde;

[1256] (c) at least one endogenous or exogenous nucleic acid molecule encoding an enzyme having aminoacetaldehyde transaminase activity that catalyzes the conversion of aminoacetaldehyde from (b) to EDA;

wherein 2-aminomalonate semialdehyde may optionally be converted to aminoacetaldehyde by a spontaneous reaction, and wherein MEG and EDA are co-produced.

[1257] [mY] In one embodiment, the application relates to a method of producing a recombinant microorganism capable of co-producing monoethylene glycol (MEG) (or glycolic acid) and ethylenediamine (EDA), from one or more pentose and/or hexose sugars and a nitrogen source, wherein the method of embodiment [mA] or embodiment [mB] (and optionally comprising embodiment [mC]), and having additionally embodiment [mD] for production of MEG in a C2 pathway, further comprises introducing into or expressing in the recombinant microorganism one or more of the following from (a) to (c):

[1258] (a) at least one endogenous or exogenous nucleic acid molecule encoding an enzyme having serine dehydrogenase activity that catalyzes the conversion of L-serine to 2-aminomalonate semialdehyde;

[1259] (b) at least one endogenous or exogenous nucleic acid molecule encoding an enzyme having 2-aminomalonate semialdehyde transaminase activity that catalyzes the conversion of 2-aminomalonate semialdehyde from (a) to 2,3-diaminopropanoate;

[1260] (c) at least one endogenous or exogenous nucleic acid molecule encoding an enzyme having 2,3-diaminopropanoate decarboxylase activity that catalyzes the conversion of 2,3-diaminopropanoate from (b) to EDA;

wherein MEG and EDA are co-produced.

[1261] [mZ] In one embodiment, the application relates to a method of producing a recombinant microorganism capable of co-producing monoethylene glycol (MEG) (or glycolic acid) and ethylenediamine (EDA), from one or more pentose and/or hexose sugars and a nitrogen source, wherein the method of embodiment [mA] or embodiment [mB] (and optionally comprising embodiment [mC]), and having additionally embodiment [mD] for production of MEG in a C2 pathway, further comprises introducing into or expressing in the recombinant microorganism one or more of the following from (a) to (c):

[1262] (a) at least one endogenous or exogenous nucleic acid molecule encoding an enzyme having serine decarboxylase activity that catalyzes the conversion of L-serine to ethanolamine;

[1263] (b) at least one endogenous or exogenous nucleic acid molecule encoding an enzyme having ethanolamine dehydrogenase activity that catalyzes the conversion of ethanolamine from (a) to aminoacetaldehyde;

[1264] (c) at least one endogenous or exogenous nucleic acid molecule encoding an enzyme having aminoacetaldehyde transaminase activity that catalyzes the conversion of aminoacetaldehyde from (b) to EDA;

wherein MEG and EDA are co-produced.

[1265] [mAA] In one embodiment, the application relates to a method of producing a recombinant microorganism capable of co-producing monoethylene glycol (MEG) (or glycolic acid) and ethylenediamine (EDA), from one or more pentose and/or hexose sugars and a nitrogen source, wherein the method of embodiment [mA] or embodiment [mB] (and optionally comprising embodiment [mC]), and having additionally embodiment [mD] for production of MEG in a C2 pathway, further comprises introducing into or expressing in the recombinant microorganism one or more of the following from (a) to (c):

[1266] (a) at least one endogenous or exogenous nucleic acid molecule encoding an enzyme having serine hydroxymethyltransferase activity that catalyzes the conversion of L-serine to glycine;

[1267] (b) at least one endogenous or exogenous nucleic acid molecule encoding an enzyme having aldehyde oxidase activity that catalyzes the conversion of glycine from (a) to aminoacetaldehyde;

[1268] (c) at least one endogenous or exogenous nucleic acid molecule encoding an enzyme having aminoacetaldehyde transaminase activity that catalyzes the conversion of aminoacetaldehyde from (b) to EDA; wherein MEG and EDA are co-produced.

[1269] [mBB] In one embodiment, the application relates to a method of producing a recombinant microorganism capable of co-producing monoethylene glycol (MEG) (or glycolic acid) and ethylenediamine (EDA), from one or more pentose and/or hexose sugars and a nitrogen source, wherein the method of embodiment [mA] or embodiment [mB] (and optionally comprising embodiment [mC]), and having additionally embodiment [mD] for production of MEG in a C2 pathway, further comprises introducing into or expressing in the recombinant microorganism one or more of the following from (a) to (e):

[1270] (a) at least one endogenous or exogenous nucleic acid molecule encoding an enzyme having an amino acid N-acetyl transferase activity or O-acetyl transferase activity that catalyzes the conversion of L-serine to N-acetylserine;

[1271] (b) at least one endogenous or exogenous nucleic acid molecule encoding an enzyme having N-acetylserine dehydrogenase activity that catalyzes the conversion of N-acetylserine from (a) to N-acetylmalonate semialdehyde;

[1272] (c) at least one endogenous or exogenous nucleic acid molecule encoding an enzyme having transaminase activity that catalyzes the conversion of N-acetylmalonate semialdehyde from (b) to acetylaminopropanoate;

[1273] (d) at least one endogenous or exogenous nucleic acid molecule encoding an enzyme having deacetylase activity that catalyzes the conversion of acetylaminopropanoate from (c) to 2,3-diaminopropanoate;

[1274] (e) at least one endogenous or exogenous nucleic acid molecule encoding an enzyme having 2,3-diaminopropanoate decarboxylase activity that catalyzes the conversion of 2,3-diaminopropanoate from (d) to EDA;

wherein MEG and EDA are co-produced.

[1275] [mCC] In one embodiment, the application relates to a method of producing a recombinant microorganism capable of co-producing monoethylene glycol (MEG) (or glycolic acid) and ethylenediamine (EDA), from one or more pentose and/or hexose sugars and a nitrogen source, wherein the method of embodiment [mA] or embodiment [mB] (and optionally comprising embodiment [mC]), and having additionally embodiment [mD] for production of MEG in a C2 pathway, further comprises introducing into or expressing in the recombinant microorganism one or more of the following from (a) to (b):

[1276] (a) at least one endogenous or exogenous nucleic acid molecule encoding an enzyme having a serine aminase activity that catalyzes the conversion of L-serine to (S)-2,3-diaminopropanoate;

[1277] (b) at least one endogenous or exogenous nucleic acid molecule encoding an enzyme having an (S)-2,3-diaminopropanoate decarboxylase activity that catalyzes the conversion of (S)-2,3-diaminopropanoate from (a) to EDA;

wherein MEG and EDA are co-produced.

[1278] [mDD] In one embodiment, the application relates to a method of producing a recombinant microorganism capable of co-producing monoethylene glycol (MEG) (or glycolic acid) and ethylenediamine (EDA), from one or more pentose and/or hexose sugars and a nitrogen source, wherein the method of embodiment [mA] or embodiment [mB] (and optionally comprising embodiment [mC]), and having additionally embodiment [mD] for production of MEG in a C2 pathway, further comprises introducing into or expressing in the recombinant microorganism one or more of the following from (a) to (b):

[1279] (a) at least one endogenous or exogenous nucleic acid molecule encoding an enzyme having an (S)-2,3-diaminopropanoate ammonia lyase activity that catalyzes the conversion of pyruvate and ammonium to (S)-2,3-diaminopropanoate;

[1280] (b) at least one endogenous or exogenous nucleic acid molecule encoding an enzyme having (S)-2,3-diaminopropanoate decarboxylase activity that catalyzes the conversion of (S)-2,3-diaminopropanoate from (a) to EDA;

wherein G3P is converted to pyruvate via endogenous glycolysis in the recombinant microorganism, and wherein MEG and EDA are co-produced.

[1281] [mEE] In another embodiment, the method of embodiment [mD] or embodiment [mE], optionally further comprises introducing one or more modifications selected from the group consisting of:

[1282] (i) a deletion, insertion, or loss of function mutation in a gene encoding a glycolaldehyde reductase that catalyzes the conversion of glycolaldehyde to monoethyleneglycol (MEG);

[1283] (ii) a deletion, insertion, or loss of function mutation in a gene encoding a glycolaldehyde dehydrogenase that catalyzes the conversion of glycolaldehyde to glycolic acid; and

[1284] (iii) a deletion, insertion, or loss of function mutation in a gene encoding a lactate dehydrogenase that catalyzes the conversion of pyruvate to lactate.

### Enzyme Engineering

[1285] The enzymes in the recombinant microorganism can be engineered to improve one or more aspects of the substrate to product conversion. Non-limiting examples of enzymes that can be further engineered for use in methods of the disclosure include a D-ribose-5-phosphate aldolase, a transketolase, a transaldolase, an aldehyde reductase, an acetoacetyl coenzyme A hydrolase, a xylose isomerase, a 3-phosphoglycerate dehydrogenase, a phosphoserine aminotransferase, a 3-phosphohydroxypyruvate phosphatase, a phosphoserine phosphatase, a serine transaminase, a hydroxypyruvate decarboxylase, a 3-phosphohydroxypyruvate reductase, a glycolaldehyde dehydrogenase, a serine oxidoreductase (deaminating) or serine-pyruvate aminotransferase, a serine decarboxylase, an ethanolamine aminotransferase or ethanolamine oxidoreductase (deaminating), a glycerate decarboxylase, a hydroxypyruvate reductase, a 3-phosphoglycerate phosphatase, a 2-phosphoglycerate phosphatase, a glycerate 3-kinase, a glycerate 2-kinase, a mevalonate diphosphate decarboxylase, and combinations thereof. These enzymes can be engineered for improved catalytic activity, improved selectivity, improved stability, improved tolerance to various fermentation conditions (temperature, pH, etc.), or improved tolerance to various metabolic substrates, products, by-products, intermediates, etc. The term “improved catalytic activity” as used herein with respect to a particular enzymatic activity refers to a higher level of enzymatic activity than that measured relative to a comparable non-engineered enzyme.

[1286] Directed evolution is a term used to describe the entire range of molecular biology techniques that allow natural evolutionary processes to be mimicked in the laboratory. For enzymes, this generally involves the random mutagenesis of one or more starting genes, followed by a screening or selection step to isolate or enrich for enzyme variants with improvements in one or more desirable properties. The process can be iterated until the desired level of change is reached, or until no further change is elicited. A wide range of tools and techniques have been developed over more than two decades to shorten the process from the millions of years taken by nature, to just weeks or months in the laboratory. The most common strategies mimic the mechanisms of evolution that occur in nature, such as error-prone PCR (epPCR), which introduces random point mutations in a population of DNA products, and DNA shuffling techniques, which allow random recombination typically between parent genes with >70% homology. Later techniques accessed a wider range of amino acids through saturation or cassette mutagenesis targeted to pre-chosen sites or at randomly distributed sites, and enabled the random recombination of non-homologous genes. Further techniques can create random insertions and deletions of codons, shuffle domains or exons, or loop regions, and produce a library of random truncations.

[1287] For example, engineering methods have been used to alter the stability, substrate specificity and stereospecificity of aldolases to produce excellent enzymes for biocatalytic processes. The thermostability and solvent tolerance of fructose-1,6-bisphosphate aldolase (FBP-aldolase) was increased using family DNA shuffling of the fda genes from Escherichia coli and Edwardsiella ictaluri. A fourth generation variant was identified which displayed an average 280-fold higher half-life at 53° C. than either parent. The same variant also displayed enhanced activity in various polar and non-polar organic solvents (Hao and Berry 2004 Protein Eng Des Sel 17:689-697).

[1288] As another example, acetoacetyl coenzyme A hydrolase can convert acetoacetyl-CoA to acetoacetate. However, the hydrolase is unspecific in that it also reacts with the same magnitude of order with acetyl-CoA, which is the substrate required for acetoacetyl-CoA formation by the enzyme thiolase. Thus, to create more efficient acetoacetyl-CoA hydrolases, these enzymes have been engineered to have at least 10× higher activity for the acetoacetyl-CoA substrate than for acetyl-CoA substrate by replacing several glutamic acid residues in the enzyme beta subunit that is important for catalysis (WO 2015/042588).

[1289] As another example, the E. coli YqhD enzyme is a broad substrate aldehyde reductase with NADPH-dependent reductase activity for more than 10 aldehyde substrates and is a useful enzyme to produce biorenewable fuels and chemicals (Jarboe 2010 Applied Microbiology and Biotechnology 89:249). Though YqhD enzyme activity is beneficial through its scavenging of toxic aldehydes, the enzyme is also NADPH-dependent and contributes to NADPH depletion and growth inhibition of organisms. Error-prone PCR of YqhD was performed in order to improve 1,3-propanediol production from 3-hydroxypropionaldehyde (3-HPA). This directed engineering yielded two mutants, D99QN147H and Q202A, with decreased Km and increased kcat for certain aldehydes, particularly 3-HPA (Li et al. 2008 Prog. Nat. Sci. 18 (12):1519-1524). The improved catalytic activity of the D99QN147H mutant is consistent with what is known about the structure of YqhD (Sulzenbacher et al. 2004 J. Mol. Biol. 342 (2):489-502), as residues Asp99 and Asn 147 both interact with NADPH. Use of the D99QN147H mutant increased 1,3-propanediol production from 3-HPA 2-fold. Mutant YqhD enzymes with increased catalytic efficiency (increased Kcat/Km) toward NADPH have also been described in WO 2011012697 A2, which is herein incorporated in its entirety.

[1290] As another example, xylose isomerase is a metal-dependent enzyme that catalyzes the interconversion of aldose and ketose sugars, primarily between xylose to xylulose and glucose to fructose. It has lower affinity for lyxose, arabinose and mannose sugars. The hydroxyl groups of sugars may define the substrate preference of sugar isomerases. The aspartate at residue 256 of Thermus thermophilus xylose isomerase was replaced with arginine (Patel et al. 2012 Protein Engineering, Design & Selection vol. 25 no. 7 pp. 331-336). This mutant xylose isomerase exhibited an increase in specificity for D-lyxose, L-arabinose and D-mannose. The catalytic efficiency of the D256R xylose isomerase mutant was also higher for these 3 substrates compared to the wild type enzyme. It was hypothesized that the arginine at residue 256 in the mutant enzyme may play a role in the catalytic reaction or influence changes in substrate orientation.

[1291] As another example, the enzyme xylitol dehydrogenase plays a role in the utilization of xylose along with xylose reductase. Xylose reductase (XR) reduces xylose to xylitol and then xylitol dehydrogenase (XDH) reoxidizes xylitol to form xylulose. However, since XR prefers NADPH as cosubstrate, while XDH exclusively uses NAD+ as cosubstrate, a cosubstrate recycling problem is encountered. One solution is to engineer XDH such that its cosubstrate specificity is altered from NAD+ to NADP+(Ehrensberger et al. 2006 Structure 14: 567-575). A crystal structure of the Gluconobacter oxydans holoenzyme revealed that Asp38 is largely responsible for the NAD+ specificity of XDH. Asp38 interacts with the hydroxyls of the adenosine ribose, and Met39 stacks under the purine ring and is also located near the 2′ hydroxyl. A double mutant (D38S/M39R) XDH was constructed that exclusively used NADP+ without loss of enzyme activity.

[1292] As another example, the enzyme mevalonate diphosphate decarboxylase (MVD) is an ATP-dependent enzyme which catalyzes the phosphorylation/decarboxylation of (R)-mevalonate-5-diphosphate to isopentenyl pyrophosphate (IPP) in the mevalonate (MVA) pathway. In the classical MVA pathway, MVD catalyzes the final step, where it produces IPP from (R)-mevalonate-5-diphosphate (MVAPP) in an irreversible reaction dependent upon ATP. MVAPP is phosphorylated first, and consequent decarboxylation occurs with the concomitant release of inorganic phosphate. With the same mechanism, classical MVDs also catalyze the conversion of the nonphosphorylated 3-hydroxyisovalerate (3-HIV) to isobutene. Mevalonate diphosphate (MDP) decarboxylase variants having improved activity in converting 3-phosphonoxyisovalerate into isobutene are disclosed in, for example, WO 2012052427 and WO 2015004211, each of which is herein incorporated in its entirety.

### Metabolic Engineering—Enzyme Overexpression or Enzyme Downregulation/Deletion for Increased Pathway Flux

[1293] In various embodiments described herein, the exogenous and endogenous enzymes in the recombinant microorganism participating in the biosynthesis pathways described herein may be overexpressed.

[1294] The terms “overexpressed” or “overexpression” refers to an elevated level (e.g., aberrant level) of mRNAs encoding for a protein(s), and/or to elevated levels of protein(s) in cells as compared to similar corresponding unmodified cells expressing basal levels of mRNAs or having basal levels of proteins. In particular embodiments, mRNA(s) or protein(s) may be overexpressed by at least 2-fold, 3-fold, 4-fold, 5-fold, 6-fold, 8-fold, 10-fold, 12-fold, 15-fold or more in microorganisms engineered to exhibit increased gene mRNA, protein, and/or activity.

[1295] In some embodiments, a recombinant microorganism of the disclosure is generated from a host that contains the enzymatic capability to synthesize substrates such as D-ribose-5-phosphate, glycolaldehyde, D-glyceraldehyde-3-phosphate, D-xylulose, D-ribulose, D-ribulose-1-phosphate, D-xylulose-1-phosphate, D-ribulose-5-phosphate, D-xylulose-5-phosphate, D-xylonolactone, D-xylonate, 2-keto-3-deoxy-xylonate, glycolaldehyde, DHAP, pyruvate, acetoacetyl-CoA, acetoacetate or 3-hydroxyisovalerate. In some embodiments, it can be useful to increase the synthesis or accumulation of, for example, D-ribose-5-phosphate, glycolaldehyde, D-glyceraldehyde-3-phosphate, D-xylulose, D-ribulose, D-ribulose-1-phosphate, D-xylulose-1-phosphate, D-ribulose-5-phosphate, D-xylulose-5-phosphate, D-xylonolactone, D-xylonate, 2-keto-3-deoxy-xylonate, glycolaldehyde, DHAP, pyruvate, acetoacetyl-CoA, acetoacetate or 3-hydroxyisovalerate, to increase the production of MEG (or GA), or MEG and one or more co-product.

[1296] In some embodiments, it may be useful to increase the expression of endogenous or exogenous enzymes involved in the MEG (or GA), or MEG and one or more co-product, biosynthesis pathways to increase flux from, for example, D-ribose-5-phosphate, glycolaldehyde, D-glyceraldehyde-3-phosphate, D-xylulose, D-ribulose, D-ribulose-1-phosphate, D-xylulose-1-phosphate, D-ribulose-5-phosphate, D-xylulose-5-phosphate, D-xylonolactone, D-xylonate, 2-keto-3-deoxy-xylonate, glycolaldehyde, DHAP, pyruvate, acetoacetyl-CoA, acetoacetate or 3-hydroxyisovalerate, thereby resulting in increased synthesis or accumulation of MEG (or GA), or MEG and one or more co-product.

[1297] Increased synthesis or accumulation can be accomplished by, for example, overexpression of nucleic acids encoding one or more of the above-described MEG (or GA), or MEG and one or more co-product, biosynthesis pathway enzymes. Overexpression of a MEG (or GA), or MEG and one or more co-product biosynthesis pathway enzyme or enzymes can occur, for example, through increased expression of an endogenous gene or genes, or through the expression, or increased expression, of an exogenous gene or genes. Therefore, naturally occurring organisms can be readily modified to generate non-natural, MEG (or GA), or MEG and one or more co-product, producing microorganisms through overexpression of one or more nucleic acid molecules encoding a MEG (or GA), or MEG and one or more co-product, biosynthesis pathway enzyme. In addition, a non-naturally occurring organism can be generated by mutagenesis of an endogenous gene that results in an increase in activity of an enzyme in the MEG (or GA), or MEG and one or more co-product, biosynthesis pathways.

[1298] Equipped with the present disclosure, the skilled artisan will be able to readily construct the recombinant microorganisms described herein, as the recombinant microorganisms of the disclosure can be constructed using methods well known in the art as exemplified above to exogenously express at least one nucleic acid encoding a MEG (or GA), or MEG and one or more co-product, biosynthesis pathway enzyme in sufficient amounts to produce MEG (or GA), or MEG and one or more co-product.

[1299] Methods for constructing and testing the expression levels of a non-naturally occurring MEG (or GA), or MEG and one or more co-product producing, host can be performed, for example, by recombinant and detection methods well known in the art. Such methods can be found described in, for example, Sambrook et al., Molecular Cloning: A Laboratory Manual, Third Ed., Cold Spring Harbor Laboratory, New York (2001); Ausubo et al., Current Protocols in Molecular Biology, John Wiley and Sons, Baltimore, Md. (1999).

[1300] A variety of mechanisms known in the art can be used to express, or overexpress, exogenous or endogenous genes. For example, an expression vector or vectors can be constructed to harbor one or more MEG (or GA), or MEG and one or more co-product, biosynthesis pathway enzymes encoding nucleic acids as exemplified herein operably linked to expression control sequences functional in the host organism. Expression vectors applicable for use in the microbial host organisms of the invention include, for example, plasmids, phage vectors, viral vectors, episomes and artificial chromosomes, including vectors and selection sequences or markers operable for stable integration into a host chromosome. Selectable marker genes also can be included that, for example, provide resistance to antibiotics or toxins, complement auxotrophic deficiencies, or supply critical nutrients not in the culture media. Expression control sequences can include constitutive and inducible promoters, transcription enhancers, transcription terminators, and the like which are well known in the art. When two or more exogenous encoding nucleic acids are to be co-expressed, both nucleic acids can be inserted, for example, into a single expression vector or in separate expression vectors. For single vector expression, the encoding nucleic acids can be operationally linked to one common expression control sequence or linked to different expression control sequences, such as one inducible promoter and one constitutive promoter. The transformation of exogenous nucleic acid sequences involved in a metabolic or synthetic pathway can be confirmed using methods well known in the art.

[1301] As will be understood by those of skill in the art, it can be advantageous to modify a coding sequence to enhance its expression in a particular host. The genetic code is redundant with 64 possible codons, but most organisms typically use a subset of these codons. The codons that are utilized most often in a species are called optimal codons, and those not utilized very often are classified as rare or low-usage codons. Codons can be substituted to reflect the preferred codon usage of the host, a process sometimes called “codon optimization” or “controlling for species codon bias.”

[1302] Optimized coding sequences containing codons preferred by a particular prokaryotic or eukaryotic host (see also, Murray et al. (1989) Nucl. Acids Res. 17:477-508) can be prepared, for example, to increase the rate of translation or to produce recombinant RNA transcripts having desirable properties, such as a longer half-life, as compared with transcripts produced from a non-optimized sequence. Translation stop codons can also be modified to reflect host preference. For example, typical stop codons for S. cerevisiae and mammals are UAA and UGA, respectively. The typical stop codon for monocotyledonous plants is UGA, whereas insects and E. coli commonly use UAA as the stop codon (Dalphin et al. (1996) Nucl. Acids Res. 24: 216-218).

[1303] Those of skill in the art will recognize that, due to the degenerate nature of the genetic code, a variety of nucleic acid sequences can be used to encode a given enzyme of the disclosure. The nucleic acid sequences encoding the biosynthetic enzymes are referenced herein merely to illustrate an embodiment of the disclosure, and the disclosure includes any nucleic acid sequences that encode the amino acid sequences of the polypeptides and proteins of the enzymes of the present disclosure. In similar fashion, a polypeptide can typically tolerate one or more amino acid substitutions, deletions, and insertions in its amino acid sequence without loss or significant loss of a desired activity. The disclosure includes such polypeptides with different amino acid sequences than the specific proteins described herein so long as the modified or variant polypeptides have the enzymatic anabolic or catabolic activity of the reference polypeptide. Furthermore, the amino acid sequences encoded by the nucleic acid sequences shown herein merely illustrate embodiments of the disclosure.

[1304] Expression control sequences are known in the art and include, for example, promoters, enhancers, polyadenylation signals, transcription terminators, internal ribosome entry sites (IRES), and the like, that provide for the expression of the polynucleotide sequence in a host cell. Expression control sequences interact specifically with cellular proteins involved in transcription (Maniatis et al., Science, 236: 1237-1245 (1987)). Exemplary expression control sequences are described in, for example, Goeddel, Gene Expression Technology: Methods in Enzymology, Vol. 185, Academic Press, San Diego, Calif. (1990).

[1305] In various embodiments, an expression control sequence may be operably linked to a polynucleotide sequence. By “operably linked” is meant that a polynucleotide sequence and an expression control sequence(s) are connected in such a way as to permit gene expression when the appropriate molecules (e.g., transcriptional activator proteins) are bound to the expression control sequence(s). Operably linked promoters are located upstream of the selected polynucleotide sequence in terms of the direction of transcription and translation. Operably linked enhancers can be located upstream, within, or downstream of the selected polynucleotide.

[1306] In some embodiments, the recombinant microorganism is manipulated to delete, disrupt, mutate, and/or reduce the activity of one or more endogenous enzymes that catalyzes a reaction in a pathway that competes with the biosynthesis pathway for the production of MEG (or GA), or MEG and one or more co-product.

[1307] In some embodiments, the recombinant microorganism is manipulated to delete, disrupt, mutate, and/or reduce the activity of one or more endogenous enzymes in the oxidative branch of the pentose phosphate pathway. In some embodiments, the manipulation prevents the conversion of glucose-6-phosphate through the oxidative branch of the pentose phosphate pathway and instead shunts glucose-6-phosphate through the non-oxidative branch of the pentose phosphate pathway to produce a pentose-phosphate intermediate needed for the production of MEG (or GA), or MEG and one or more co-product. Wherein the pentose-phosphate intermediate is D-ribose-5-phosphate, D-ribulose-5-phosphate or D-xylulose-5-phosphate. In some such embodiments, the one or more endogenous enzyme is selected from glucose 6-phosphate-1-dehydrogenase, 6-phosphogluconolactonase, and 6-phosphogluconate dehydrogenase. In further embodiments, the glucose 6-phosphate-1-dehydrogenase is zwf, the 6-phosphogluconolactonase is pgl, and the 6-phosphogluconate dehydrogenase is gnd.

[1308] In some embodiments, the recombinant microorganism is manipulated to delete, disrupt, mutate, and/or reduce the activity of glyceraldehyde 3-phosphate dehydrogenase. In some embodiments, the manipulation prevents the conversion of glyceraldehyde 3-phosphate to 1,3-bisphospho-D-glycerate and instead allow glyceraldehyde 3-phosphate to be converted to xylulose-5-phosphate (with a concurrent conversion of fructose-6-phosphate to erythrose-4-phosphate) by a transketolase, and thus produce a pentose-phosphate intermediate needed for the production of MEG (or GA), or MEG and one or more co-product, and provide more erythrose-4-phosphate for the non-oxidative branch of the pentose phosphate pathway to further produce a pentose-phosphate intermediate. In some embodiments, the glyceraldehyde 3-phosphate dehydrogenase is gapA. Wherein the pentose-phosphate intermediate is D-ribose-5-phosphate, D-ribulose-5-phosphate or D-xylulose-5-phosphate.

[1309] In some embodiments, the recombinant microorganism is manipulated to delete, disrupt, mutate, and/or reduce the activity of 6-phosphofructokinase. In some embodiments, the manipulation prevents the conversion of fructose-6-phosphate to 1,6-bisphosphate and instead allow fructose-6-phosphate to be converted to erythrose-4-phosphate and acetyl-phosphate by a fructose-6-phosphate phosphoketolase, and provide more erythrose-4-phosphate for the non-oxidative branch of the pentose phosphate pathway to further produce a pentose-phosphate intermediate needed for the production of MEG (or GA), or MEG and one or more co-product. In some embodiments, the 6-phosphofructokinase is pfkA and/or pfkB.

[1310] In some embodiments, the recombinant microorganism is manipulated to delete, disrupt, mutate, and/or reduce the activity of one or more endogenous enzymes that catalyzes the conversion of glycolaldehyde to glycolic acid. In some such embodiments, the enzyme that catalyzes the conversion of glycolaldehyde to glycolic acid is a glycolaldehyde dehydrogenase. In some embodiments, the glycolaldehyde dehydrogenase is from Escherichia coli. In some embodiments, the glycolaldehyde dehydrogenase is encoded by the aldA gene or homologs thereof. In some embodiments, the manipulation prevents the production of glycolic acid from glycolaldehyde and instead shunts the reaction toward conversion of glycolaldehyde to MEG. In some embodiments, the deletion, disruption, mutation, and/or reduction in the activity of one or more endogenous enzymes that catalyzes the conversion of glycolaldehyde to glycolic acid is partial, wherein some glycolaldehyde dehydrogenase function is still present and an amount of glycolic acid is still produced.

[1311] In some embodiments, the recombinant microorganism is manipulated to delete, disrupt, mutate, and/or reduce the activity of one or more endogenous enzymes that catalyzes the conversion of pyruvate to lactate. In some such embodiments, the enzyme that catalyzes the conversion of pyruvate to lactate is a lactate dehydrogenase. In some embodiments, the lactate dehydrogenase is from Escherichia coli. In some embodiments, the lactate dehydrogenase is encoded by the IdhA gene or homologs thereof. In some embodiments, the manipulation prevents the production of lactate from pyruvate and instead shunts the reaction toward production of MEG (or GA), or MEG and one or more co-product.

[1312] In some embodiments, the recombinant microorganism is manipulated to delete, disrupt, mutate, and/or reduce the activity of one or more endogenous enzymes that catalyzes the conversion of glycolaldehyde to monoethyleneglycol (MEG) and instead shunt the reaction toward conversion of glycolaldehyde to glycolic acid (GA). In some embodiments, the enzyme having glycolaldehyde reductase activity is from Escherichia coli. In some embodiments, the enzyme having glycolaldehyde reductase activity is encoded by the fucO gene, or homolog thereof.

[1313] The foregoing detailed description has been given for clearness of understanding only and no unnecessary limitations should be understood there from as modifications will be obvious to those skilled in the art.

[1314] While the disclosure has been described in connection with specific embodiments thereof, it will be understood that it is capable of further modifications and this application is intended to cover any variations, uses, or adaptations of the disclosure following, in general, the principles of the disclosure and including such departures from the present disclosure as come within known or customary practice within the art to which the disclosure pertains and as may be applied to the essential features hereinbefore set forth and as follows in the scope of the appended claims.

[1315] The disclosures, including the claims, figures and/or drawings, of each and every patent, patent application, and publication cited herein are hereby incorporated herein by reference in their entireties.

### EXAMPLES

### Example 1

### Generation of 6-His Tagged Constructs for DERA Variants, Pentose Kinases, and Aldehyde Dehydrogenase

[1316] For deoxy-ribose-5-phosphate aldolase (DERA) constructions, the wild-type genes encoding DERA from Escherichia coli (EcDERA or EcdeoC, UniProt accession number P0A6L0)(SEQ ID NO: 255) and from Bacillus caldolyticus (BcDERA, or BcdeoC, UniProt accession number A0A2H5KL15)(SEQ ID NO: 286) were synthesized by GenScript (Hong Kong, China) with codon optimization based on the E. coli codon for the BcDERA (SEQ ID NO: 287). The two DNA fragments were cloned in pET28 plasmid.

[1317] Based on the published DERA sequence (Heine, A. et al. (2001) Observation of covalent intermediates in an enzyme mechanism at atomic resolution. Science 294: 369-374) [1], site-directed mutagenesis was carried out to replace cysteine at position 47 by an arginine (C47N) in EcDERA amino acid sequence or at the equivalent position, C37, in BcDERA (to create C37N) as determined by protein alignment (FIG. 8). These sites were chosen to improve DERA activity because C47 of EcDERA and C47 of BcDERA are located near the active site. Site-directed mutagenesis was carried out using the primers in Table 2 (mutated codon is underlined) and the Phusion Site-Directed Mutagenesis Kit (from Thermo Scientific) according to manufacturer's procedure. As a negative control, an inactive DERA was constructed by mutating the catalytic lysine at position 201 in EcDERA or the equivalent position 181 in BcDERA, by an asparagine (mutation K201N for EcDERA or K181N for BcDERA) using primers in Table 2. All wild-type sequences and the introduction of specific mutations were analysed and validated by sequencing (Eurogentec).

[1318] The pentose kinases, ribokinase (rbsK) (SEQ ID NO: 290), xylulokinase (Xuk) (SEQ ID NO: 291), and ribulokinase (AraB)(SEQ ID NO: 288) were obtained using genomic DNA from organism of origin and PCR primers in Table 2. Aldehyde dehydrogenase was obtained using genomic DNA of E. Coli and primers in Table 2.

TABLE 2
Origin of DNA and Primers Used in Obtaining Target Genes

| Origin and | | |
|---|---|---|
| Gene | Mutation | Primer sequence |
| Escherichia coli | C47N | C GGC AAT ACC GCC GCT ATC AAT ATC TAT CCT CGC UT ATC C (SEQ |
| (EcDERA) | | ID NO: 257) |
| | | G GAT AAA GCG AGG ATA GAT ATT GAT AGC GGC GGT ATT GCC G |
| | | (SEQ ID NO: 258) |
| | K201N | GTA GAA AAA ACC GTT GGT UC AAC CCG GCG GGC (SEQ ID NO: 259) |
| | | GCC CGC CGG GTT GAA ACC AAC GGT TTT UC TAC (SEQ ID NO: 260) |
| Bacillus | C37N | C TTC GCG GCG GTG AAC GTT AAC CCG ACC TG (SEQ ID NO: 261) |
| caldolyticus | | CA GGT CGG GTT AAC GTT CAC CGC CGC GAA G (SEQ ID NO: 262) |
| (BcDERA) | K181N | GCG GGT GTG AAC GCG AGC GGC GGT G (SEQ ID NO: 263) |
| | | C ACC GCC GCT CGC GTT CAC ACC CGC (SEQ ID NO: 264) |
| Escherichia coli | — | TAAGCACCATGGCAATGCAAAACGCAG (SEQ ID NO: 265) |
| (ribokinase, | — | TGCTTAAAGCTTCCTCTGCCTGTCTAAAAATG (SEQ ID NO: 266) |
| rbsK) | | |
| Thermotoga | — | AGGAGATATACCATGGTGGAAGCGGTGATTTTCGACA (SEQ ID NO: 267) |
| maritima | — | GTGCGGCCGCAAGCTTAAGAACCTCTTTGAGAACGTTCAG (SEQ ID NO: |
| (xylulokinase, | | 268) |
| XuK) | | |
| Escherichia coli | — | ATGGCGATTGCAATTGGCC (SEQ ID NO: 269) |
| (ribulokinase, | — | CGAATTCGTTATAGAGTCGCAACGGCCTGG (SEQ ID NO: 270) |
| AraB) | | |
| Escherichia coli | — | CATATGTCAGTACCCGTTCAACATCCTATG (SEQ ID NO: 271) |
| (aldehyde | — | GAATTCGTTAAGACTGTAAATAAACCACCTGGGTCTG (SEQ ID NO: 272) |
| dehydrogenase, | | |
| aldA) | | |

[1319] Protein Expression and Purification

[1320] Freshly prepared Escherichia coli cells (DE3, New England Biolabs) were used for protein expression. Bacteria cultures were started at OD 600 nm of 0.05 from an overnight pre-culture on rich medium LB (yeast extract 5 g/L, tryptone 10 g/L, NaCl 10 g/L) supplemented with kanamycin at 50 μg/mL. Protein expression was then induced when OD 600 nm reached 0.6/0.8 by addition of 0.5 mM of isopropyl β-D-1-thiogalactopyranoside (IPTG) to the culture medium. Cultures were done at 30° C. and expression was induced for 4 hours. Following expression, E. coli cells were harvested by centrifugation and cell pellets were kept at −20° C. until used. To recover and purify the expressed proteins, frozen pellets were resuspended on ice in binding buffer (HEPES 50 mM, pH 7.4, NaCl 300 mM) and sonicated (4 cycles of 30 second on/30 second off, power 30% with a microtip, model FB505 from Fisher Scientific) and then centrifuged at 20.000 g for 15 minutes at 4° C. The supernatant was mixed with His Spintrap TALON (Merck) slurry solution to purify the tagged his-protein according to manufacturer recommendation. All protein purity was checked on SDS-PAGE and showed a major band at the expected size, suggesting a >90% pure protein. Purified protein in elution buffer was exchanged using 10 kDa Amicon Ultra Centrifugal Filter (Merck) for HEPES 50 mM, pH 7, KCl 100 mM, MgCl₂ 5 mM for DERA protein enzymatic assays or HEPES 60 mM, pH 7.5, KCl 60 mM, MgCl₂ 3 mM for the PGM3 protein enzymatic assays.

[1321] In Vitro Pentose Kinase Activity Assay

[1322] The pentose kinases (ribokinase (rbsK), ribulokinase (AraB), and xylulokinase (XuK)) that were purified as described above were assayed on their respective pentose by enzymatic coupling of ADP produced to NADH oxidation using pyruvate kinase and lactate dehydrogenase (FIG. 9 and FIG. 14). The reaction mixture contained HEPES 50 mM, pH 7, KCl 100 mM, MgCl2 5 mM, appropriate amount of the sugarkinase, ATP 2 mM, NADH 0.25 mM, range of pentose concentration, phospho-enol-pyruvate 2 mM, commercially available pyruvate kinase (PK) and lactate dehydrogenase (LDH) at 2 U/mL (all products were purchased from Merck).

[1323] Results of the assay showing Michaelis-Menten curves with a pentose substrate for rbsK, xylulokinase (XuK), or AraB are in FIG. 10, FIG. 11, and FIG. 12, respectively. The initial rate is plotted as a function of the substrate concentration. The results indicate that each of the expressed and purified kinases showed kinase activity on their respective pentose substrates.

[1324] In Vitro DERA Variant Activity Assay

[1325] The in vitro enzymatic assay of DERA variants was carried out by the enzymatic coupling method. FIG. 13 shows the scheme for the DERA assay carried out using the natural substrate of DERA, 2-deoxy-ribose-5P. FIG. 14 shows the scheme for the DERA assay carried out using pentose-5P substrates derived from an upstream kinase reaction. Assays were monitored by measuring the oxidation of NADH at OD 340 nm resulting from the conversion of dihydroxyacetone 3-P (DHAP) to glycerol-3P by glycerol-3-P dehydrogenase (GPDH). Reactions were followed spectrophotometrically at 37° C.

[1326] For reactions using the natural substrate, mixtures contained HEPES 50 mM, pH 7.0: KCl 100 mM, MgCl₂ 5 mM, NADH 0.25 mM, 2-deoxy-ribose-5P 5 mM, commercially available triose phosphate isomerase (TPI) and glycerol-3-P dehydrogenase (GPDH) at 2 U/mL and appropriate amount of DERA variant protein.

[1327] For reactions using kinase-derived pentose-5P substrates, the pentose was either ribose, ribulose, or xylulose. The assays were carried out according to the scheme in FIG. 14 and the mixtures contained HEPES 50 mM, pH 7.0: KCl 100 mM, MgCl₂ 5 mM, NADH 0.25 mM, commercially available triose phosphate isomerase (TPI), glycerol-3-P dehydrogenase (GPDH) at 2 U/mL, an appropriate amount of DERA variant protein, 5 mM pentose (ribose, ribulose, or xylulose), an appropriate amount of the specific kinase (i.e. rbsK, AraB, or Xuk), and ATP at 2.5-5 mM.

[1328] The in vitro assays for DERA variants demonstrate the impact of the mutations in the DERA protein on enzymatic activity for the natural substrate, 2-deoxy-ribose-5P. Results showing Michaelis-Menten kinetics for each of the DERA variant's activity are shown in FIG. 15, FIG. 16, FIG. 17, FIG. 18, FIG. 19, and FIG. 20. Specific activities for the wild type DERA enzymes from a commercially available source (FIG. 15), synthesized wild type EcDERA enzyme (FIG. 16), and synthesized BcDERA enzyme (FIG. 17) were determined. The synthesized EcDERA C47N variant (FIG. 18) retained reduced activity relative to the wild type EcDERA enzyme. Likewise, the synthesized BcDERA C47N variant (FIG. 19) retained reduced activity relative to the WT BcDERA enzyme. The negative control EcDERA K201N variant, as expected, showed no activity (FIG. 20).

[1329] Table 3 shows results from the in vitro assays for DERA variants demonstrating the impact of the mutations in the DERA protein on enzymatic conversion of ribose-5P, ribulose-5P, and xylulose-5P substrates generated by upstream pentose kinases to glyceraldehyde-3P, and subsequent conversion to DHAP and glycerol-3P. The results suggest that the mutated forms of DERA reduce the rate of glyceraldehyde-3P production and subsequent conversion to DHAP and glycerol-3P.

TABLE 3
Results demonstrating DERA activity on target pentose-5-P intermediates
and the impact of DERA mutations on pentose-5P conversion to glycoaldehyde
and G3P. DERA specific activity of DERA proteins. Vmax was estimated
with an initial substrate concentration of 5 mM.

| | Ribose-5P | Ribulose-5P | Xylulose-5P |
|---|---|---|---|
| Enzyme | (μmol/(min × mg)) | (μmol/(min × mg)) | (μmol/(min × mg)) |
| EcDERA (WT) | 0.0105 ± 0.0138 | 0.0018 ± 0.0018 | 0.0072 ± 0.0055 |
| EcDERA (C47N) | 0.0056 | 0.0005 | 0.0004 ± 0.0015 |
| EcDERA (K201N) | No activity | No activity | No activity |
| BcDERA (WT) | 0.0028 ± 0.0018 | 0.0009 ± 0.0013 | 0.001 ± 0.0013 |
| BcDERA (C37N) | 0.0015 ± 0.0008 | No activity | 0.0018 ± 0.0023 |
| BcDERA (K181N) | No activity | No activity | No activity |

[1330] In Vitro Enzymatic Assay for aldA

[1331] AldA protein was tested on its natural substrate, glycolaldehyde, according to the scheme in FIG. 21 by directly monitoring NADH formation. The reaction mixture contained HEPES 50 mM, pH 7, KCl 100 mM, MgCl₂ 5 mM, appropriate amount of aldA protein, NAD⁺2.5 mM, glycolaldehyde 5 mM, (NAD⁺ was purchased from Merck).

[1332] The results in FIG. 22 demonstrate that specific activity of the recombinant aldA enzyme retained activity for converting glycoaldehyde to glycolate.

[1333] In Vitro Validation of GA Production from Pentose and Pentose-5P Intermediates Using DERA

[1334] This enzymatic assay was designed to validate the in vitro production of glycolic acid from a pentose (ribose, ribulose, or xylulose) and pentose-5P intermediates (ribose-5P, ribulose-5P, or xylulose-5P) by the use and dependency of the DERA enzyme and its variants (FIG. 23). The enzymatic assay was set-up in a reaction mixture of HEPES buffer 50 mM, pH 7.0, KCl 100 mM, MgCl₂ 5 mM, NADH 3 mM, ATP*Mg 15 mM, and pentose (ribose, ribulose, or xylulose) 20 mM. The reaction mixture was completed with addition of purified ribokinase (for ribose containing reactions), ribulokinase (for ribulose containing reactions), or xylulokinase (for xylulose containing reactions) each at 0.2 mg/mL, and purified aldehyde dehydrogenase (aldA) at 0.25 mg/mL, a mix of TPI and GPDH at 2 U/mL (TPI/GPDH from Merck) and purified DERA protein at 2.5 mg/mL. The reaction was carried out for 24 hours at 37° C. Following the reaction, the pentose and glycolate concentrations were determined by high-performance liquid chromatography using Thermo Fisher Scientific system (Courtaboeuf, France) equipped with a RI detector, with a UV detector at 205 nm and a Phenomenex column (Rezex H+) at 50° C. using 2.5 mM H₂SO₄ as mobile phase at 0.5 mL/min. Results from the in vitro validation experiment are given in Table 4, Table 5, and Table 6. For the production of glycolate from xylulose or ribulose according to the scheme in FIG. 23, the EcDERA C47N variant increased production of glycolate compared to EcDERA WT. For the production of glycolate from xylulose, ribulose, or ribose, the BcDERA C37N retained reduced production of glycolate compared to BcDERA WT. As expected, the negative control variants EcDERA K201N and BcDERA K181N did not retain significant capacity to produce glycolate from pentose. Results demonstrate the in-vitro production of glycolic acid from pentose sugars, i.e. from ribose, ribulose and xylulose, by the use of DERA enzyme candidates. Therefore, results also demonstrated DERA activity on target pentose-5P intermediates, like D-ribose-5P, D-ribulose-5P and D-xylulose-5P, validating DERA's ability to convert such pentose-5P intermediates into glycoaldehyde and G3P.

TABLE 4
Results from the in vitro validation
assay for GA production from xylulose

| Enzyme | Xylulose (mM) | Glycolate (mM) |
|---|---|---|
| EcDERA WT | 6.27 | 2.54 |
| EcDERA (C47N) | 5.84 | 2.81 |
| EcDERA (K201N) | 1.67 | 0.18 |
| No DERA | 1.97 | 0.19 |
| No kinase | 15.46 | 0.21 |
| — | — | — |
| BcDERA WT | 2.73 | 1.39 |
| BcDERA (C37N) | 2.72 | 0.62 |
| BcDERA (K181N) | 2.58 | 0.09 |
| No DERA | 2.84 | 0.00 |
| No kinase | 20.71 | 0.00 |

TABLE 5
Results from the in vitro validation assay
for GA production from ribuloase

| Enzyme | Ribulose (mM) | Glycolate (mM) |
|---|---|---|
| EcDERA WT | 3.36 | 6.37 |
| EcDERA (C47N) | 1.78 | 7.87 |
| EcDERA (K201N) | 1.67 | 0.18 |
| No DERA | 1.97 | 0.19 |
| No kinase | 9.06 | 0.29 |
| — | — | — |
| BcDERA WT | 0.00 | 1.70 |
| BcDERA (C37N) | 0.00 | 0.53 |
| BcDERA (K181N) | 0.00 | 0.00 |
| No DERA | 0.00 | 0.00 |
| No kinase | 26.50 | 0.00 |

TABLE 6
Results from the in vitro validation
assay for GA production from ribose

| Enzyme | Ribose (mM) | Glycolate (mM) |
|---|---|---|
| BcDERA WT | 0.20 | 0.90 |
| BcDERA (C37N) | 0.10 | 0.40 |
| BcDERA (K181N) | 0.10 | — |

### Example 2

[1335] In Vivo Assay for Glycolic Acid Production Using DERA in E. coli

[1336] To assess the feasibility of using DERA for glycolic acid (GA) production in vivo, an assay was developed based on the use of a screening E. coli strain with the genotype MG1655 ΔtktA-ΔtktB. As described in FIG. 24, such a strain cannot grow on xylose by itself, because of the deletion of transketolase genes tktA (GenBank Gene ID: 947420) and tktB (GenBank Gene ID: 945865). However, a strain expressing an active DERA protein can use pentoses phosphorylated on carbon 5 (pentose-5P) to produce glycolaldehyde and glyceraldehyde-3-phosphate. Glycolaldehyde and glyceraldehyde-3-phosphate can enter the glyoxylate shunt and glycolysis to support strain growth. Consequently, in vivo DERA activity in the screening strain is directly correlated with cell growth.

[1337] Deletion of tktA and tktB

[1338] Deletion of tktA and tktB were performed sequentially in Escherichia coli MG1655 wild-type strain. First, deletion of tktA and tktB was performed by transduction according to standard procedure (Thomason L C, et al. (2007) E. Coli genome manipulation by P1 transduction. Curr Protoc Mol Biol. Chapter 1: Unit 1 17) using a MG1655 ΔtktA::KanR strain JW5478 and a MG1655 ΔtktB::KanR strain JW2449, both obtained from the Keio single-gene deletion collection (Baba T, et al. (2006) Construction of E. Coli K-12 in-frame, single-gene knockout mutations: the Keio collection. Mol Sys Biol. 2:2006 0008). Transformants were selected on LB agar supplemented with 100 μg/ml kanamycin and identified by colony PCR and sequencing. Removal of the antibiotic marker was further performed by specific recombination of FTR regions, using Flp recombination, as previously described in the literature (Datsenko K A and Wanner B L (2000) One-step inactivation of chromosomal genes in Escherichia coli K-12 using PCR products. Proc Natl Acad Sci USA 97:6640-6645). The resulting strain was named DERA_screening_01: MG1655 ΔtktA-ΔtktB.

[1339] Obtention of a DERA C47N Mutant

[1340] DERA from E. coli (UniProt accession number P0A6L0) was synthesized by GenScript (Hong Kong, China) and cloned in a pET28 vector. Site directed mutagenesis was then used to introduce the point mutation according to the primers described in Table 7, using the Phusion Site-Directed Mutagenesis® Kit (Thermo Scientific™), according to manufacturer's procedure. The EcDERA C47N (SEQ ID NO: 294) mutant was further confirmed by sequencing.

TABLE 7
Oligonucleotides used for site directed
mutagenesis. Mutated site is in bold.

| Primer | Primer sequence |
|---|---|
| C47N_FW | CGGCAATACCGCCGCTATCAATATCTATCCTCGCTTTATCC |
| | (SEQ ID NO: 273) |
| C47N_RV | GGATAAAGCGAGGATAGATATTGATAGCGGCGGTATTGCCG |
| | (SEQ ID NO: 274) |

[1341] Plasmid Construction for DERA Expression in the Cell Growth-Based Screening Strain

[1342] To express DERA in the screening strain, a pZS21 plasmid (Expressys) was first modified by replacing the P_{LtetO-1} promoter by a J23119 (SEQ ID NO: 293) or a J23101 (SEQ ID NO: 292) constitutive promoter (http://parts.igem.org/Promoters/Catalog/Anderson). Both J23119 and J23101 promoters were obtained as synthetic gene fragments, synthesized by GeneWiz® (Leipzig, Germany). Synthetic promoters were amplified by PCR, using primers detailed in Table 8. They were subsequently cloned into the pZS21 plasmid linearized by enzymatic restriction with AatII and KpnI, by using the NEBuilder® HiFi DNA Assembly Cloning Kit (New England Biolabs) according to the manufacturer's protocol. Construction was confirmed by PCR and sequencing. The resulting plasmids were respectively called pZS2-J23119 and pZS2-J23101.

[1343] In order to express a higher number of copies of DERA, the two plasmids were modified with a p15A origin of replication, recovered from a pZA21 plasmid (Expressys). A fragment containing promoter and kanamycin marker from pZS2-J23119 (or pZS2-J23101) was amplified by PCR, along with a fragment containing the p15A origin and multiple cloning site of pZA21, using primers described in Table 8. In-Fusion® HD Cloning Kit (Clontech) was used according to manufacturer's protocol to recombine the DNA fragments into functional plasmids. The resulting plasmids were respectively called pZA2-J23119 and pZA2-J23101.

[1344] The EcDERA C47N variant was amplified by PCR using plasmids described in Table 8. It was subsequently cloned into either pZA2-J23119 or pZA2-J23101 linearized by enzymatic restriction with Kpn1, by using In-Fusion® HD Cloning Kit (Clontech) according to manufacturer's protocol. Construction was confirmed by PCR and sequencing. The resulting plasmids were called pZA2-J23119-DERA (SEQ ID NO: 295) and pZA2-J23101-DERA (SEQ ID NO: 296), respectively.

TABLE 8
Oligonucleotides used for the construction of plasmids pZS2-J23119, pZS2-
J23101, pZA2-J23119, pZA2-J23101, pZA2-J23119-DERA and pZA2-J23101-DERA.
Binding regions are underlined.

| Primer name | Sequence |
|---|---|
| pZS2_J23101_J23119 FW | CGCCCCAGCTGGCAATTCCGACTAAGAAACACAGCTAACACCACG (SEQ ID |
| | NO: 275) |
| pZS2_J23101_RV | GTGGTGGTACGCGTACCATGGGATCGGTACCGCTAGCATAATACCTAGGA |
| | CTGAGC (SEQ ID NO: 276) |
| pZS2_J23119_RV | GTGGTGGTACGCGTACCATGGGATCGGTACCGCTAGCATTATACCTAGGA |
| | CTGAGC (SEQ ID NO: 277) |
| pZA2_MCS_ori_FW | TCGAGGTCGACGGTATCGATAAGCTTGATATCGAA (SEQ ID NO: 278) |
| pZA2_MCS_ori_RV | AGCTCGCTTGGACTCCTGTTGATAGATCC (SEQ ID NO: 279) |
| pZS2_Kan_Promoter_FW | GAGTCCAAGCGAGCTCTCGAACCCCAGAGTCCC (SEQ ID NO: 280) |
| pZS2_Kan_J23101_FW | TACCGTCGACCTCGACGGTACCGCTAGCATAATACCT (SEQ ID NO: 281) |
| pZS2_Kan_J23119_RV | TACCGTCGACCTCGACGGTACCGCTAGCATTATACCT (SEQ ID NO: 282) |
| DERA_assembly_J23101_ | GGTATTATGCTAGCGTAATAGAAATAATTTTGTTTAACTTTAAGGAGGTTT |
| RV | GGAATGGCAACTGATCTGAAAGCAAGCAGCC (SEQ ID NO: 283) |
| DERA_assembly_J23119_ | GGTATAATGCTAGCGTAATAGAAATAATTTTGTTTAACTTTAAGGAGGTTT |
| RV | GGAATGGCAACTGATCTGAAAGCAAGCAGCC (SEQ ID NO: 284) |
| DERA_assembly_RV | CCGTCGACCTCGACGTTAGTAGCTGCTGGCGCTCTTACCG (SEQ ID NO: |
| | 285) |

In Vivo Assay for Growth of a MG1655 ΔtktA-ΔtktB Using E. coli DERA C47N Variant

[1345] Screening strain DERA_screening_01 (MG1655 ΔtktA-ΔtktB) was transformed by electroporation with either pZA2-J23119-DERA or pZA2-J23101-DERA plasmid, or with empty vector alone using standard procedures (Woodall C. A. E. coli Plasmid Vectors. Methods in Molecular Biology™. 2003. vol 235. doi: 10.1385/1-59259-409-3:55). The resulting strains were grown in M9 xylose medium (20 g/L xylose) for 50 hours. Kanamycin was added with a final concentration of 100 μg/mL. Growth was monitored by OD₆₀₀.

[1346] Results of the growth assay are shown in FIG. 25. The MG1655 ΔtktA-ΔtktB strains containing pZA2-J23119-DERA (J23119 DERA) or pZA2-J23101-DERA (J23101 DERA) both showed enhanced growth compared to their respective controls. J23119 DERA showed enhanced growth compared to J23101 DERA. Taken together, the results suggest that the EcDERA C47N variant expressed in the MG1655 ΔtktA-ΔtktB strain can enable growth when cultured in xylose minimum media.

### ENUMERATED EMBODIMENTS

### Embodiment 1

[1347] A recombinant microorganism comprising one or more biochemical pathways that produces one or more products derived from glyceraldehyde-3-phosphate (G3P) and glycolaldehyde from one or more pentose and/or hexose sugars via a pentose-phosphate intermediate; wherein the one or more biochemical pathway comprises expression of at least one enzyme having pentose-phosphate aldolase activity.

### Embodiment 2

[1348] The recombinant microorganism of embodiment 1, wherein the pentose-phosphate intermediate is D-ribose-5-phosphate, D-ribulose-5-phosphate or D-xylulose-5-phosphate and wherein the enzyme have D-ribose-5-phosphate, D-ribulose-5-phosphate or D-xylulose-5-phosphate aldolase activity.

### Embodiment 3

[1349] The recombinant microorganism of any preceding embodiment, wherein the recombinant microorganism co-produces monoethylene glycol (MEG) and one or more co-products.

### Embodiment 4

[1350] The recombinant microorganism of any preceding embodiment wherein the one or more co-products are selected from acetone, isopropanol, propene, L-serine, glycine, monoethanolamine (MEA), ethylenediamine, or a combination thereof.

### Embodiment 5

[1351] The recombinant microorganism of any preceding embodiment, wherein the one or more product is selected from monoethylene glycol (MEG) and glycolic acid (GA).

### Embodiment 6

[1352] The recombinant microorganism of any preceding embodiment, wherein the one or more biochemical pathway comprises expression of at least one enzyme having transketolase activity.

### Embodiment 7

[1353] The recombinant microorganism of any preceding embodiment, wherein the at least one enzyme having transketolase activity is encoded by an amino acid sequence having at least 70% sequence identity, at least 80% sequence identity, or at least 90% sequence identity to tktA or tktB from E. coli.

### Embodiment 8

[1354] The recombinant microorganism of any preceding embodiment, wherein the at least one enzyme having pentose-phosphate aldolase activity is encoded by an amino acid sequence having at least 70% sequence identity, at least 80% sequence identity, or at least 90% sequence identity to deoC from E. coli.

### Embodiment 9

[1355] The recombinant microorganism of any preceding embodiment, wherein the one or more biochemical pathway comprises expression of at least one enzyme having transaldolase activity.

### Embodiment 10

[1356] The recombinant microorganism of any preceding embodiment, wherein the at least one enzyme having transaldolase activity is encoded by an amino acid sequence having at least 70% sequence identity, at least 80% sequence identity, or at least 90% sequence identity to talA or talB from E. coli.

### Embodiment 11

[1357] The recombinant microorganism of any preceding embodiment, wherein the one or more biochemical pathway comprises expression of at least one enzyme having ribulose-5-phosphate 3-epimerase activity.

### Embodiment 12

[1358] The recombinant microorganism of any preceding embodiment, wherein the at least one enzyme having ribulose-5-phosphate 3-epimerase activity is encoded by an amino acid sequence having at least 70% sequence identity, at least 80% sequence identity, or at least 90% sequence identity to rpe from E. coli.

### Embodiment 13

[1359] The recombinant microorganism of a any preceding embodiment, wherein the one or more biochemical pathway comprises expression of at least one enzyme having ribose-5-phosphate isomerase activity.

### Embodiment 14

[1360] The recombinant microorganism of any preceding embodiment, wherein the at least one enzyme having ribose-5-phosphate isomerase activity is encoded by an amino acid sequence having at least 70% sequence identity, at least 80% sequence identity, or at least 90% sequence identity to rpiA or rpiB from E. coli.

### Embodiment 15

[1361] The recombinant microorganism of a any preceding embodiment, wherein the recombinant microorganism further comprises a deleted or diminished activity in one or more endogenous enzymes selected from glyceraldehyde 3-phosphate dehydrogenase, phosphoglycerate kinase and phosphoglycerate mutase.

### Embodiment 16

[1362] The recombinant microorganism of any preceding embodiment, wherein the glyceraldehyde 3-phosphate dehydrogenase is gapA, the phosphoglycerate kinase is pgk and the phosphoglycerate mutase is gpmA and/or gpmM.

### Embodiment 17

[1363] The recombinant microorganism of any preceding embodiment, wherein the one or more biochemical pathway comprises expression of at least one enzyme having fructose-6-phosphate phosphoketolase activity.

### Embodiment 18

[1364] The recombinant microorganism of any preceding embodiment, wherein the at least one enzyme having fructose-6-phosphate phosphoketolase activity is encoded by an amino acid sequence having at least 70% sequence identity, at least 80% sequence identity, or at least 90% sequence identity to an enzyme having fructose-6-phosphate phosphoketolase activity selected from Bifidobacterium dentium BDP_1006, Bifidobacterium lactis xfp, Lactobacillus paraplantarum xpkA and Bifidobacterium breve xfp.

### Embodiment 19

[1365] The recombinant microorganism of any preceding embodiment, wherein the one or more biochemical pathway comprises expression of at least one enzyme having phosphate acetyltransferase activity.

### Embodiment 20

[1366] The recombinant microorganism of any preceding embodiment, wherein the at least one enzyme having phosphate acetyltransferase activity is encoded by an amino acid sequence having at least 70% sequence identity, at least 80% sequence identity, or at least 90% sequence identity to an enzyme having phosphate acetyltransferase activity selected from E. coli pta and Clostridium acetobutylicum pta.

### Embodiment 21

[1367] The recombinant microorganism of any preceding embodiment, wherein the recombinant microorganism further comprises a deleted or diminished activity in an endogenous 6-phosphofructokinase enzyme.

### Embodiment 22

[1368] The recombinant microorganism of any preceding embodiment, wherein the 6-phosphofructokinase is pfkA and/or pfkB.

### Embodiment 23

[1369] The recombinant microorganism of a any preceding embodiment, wherein the recombinant microorganism further comprises a deleted or diminished activity in one or more endogenous enzymes selected from glucose 6-phosphate-1-dehydrogenase, 6-phosphogluconolactonase, and 6-phosphogluconate dehydrogenase.

### Embodiment 24

[1370] The recombinant microorganism of any preceding embodiment, wherein the glucose 6-phosphate-1-dehydrogenase is zwf, the 6-phosphogluconolactonase is pgl, and the 6-phosphogluconate dehydrogenase is gnd.

### Embodiment 25

[1371] The recombinant microorganism of any preceding embodiment, wherein the one or more pentose and/or hexose sugars comprise D-xylose and the recombinant microorganism further comprises expression of at least one enzyme having xylose isomerase activity and expression of at least one enzyme having xylulose 5-kinase activity.

### Embodiment 26

[1372] The recombinant microorganism of any preceding embodiment, wherein the at least one enzyme having xylose isomerase activity is encoded by an amino acid sequence having at least 70% sequence identity, at least 80% sequence identity, or at least 90% sequence identity to xylA from E. coli or Pyromyces sp.

### Embodiment 27

[1373] The recombinant microorganism of any preceding embodiment, wherein the at least one enzyme having xylulose 5-kinase activity is encoded by an amino acid sequence having at least 70% sequence identity, at least 80% sequence identity, or at least 90% sequence identity to xylB from E. coli.

### Embodiment 28

[1374] The recombinant microorganism of a any preceding embodiment, wherein the one or more pentose and/or hexose sugars comprise D-fructose and the recombinant microorganism further comprises expression of at least one enzyme having fructose 1,6-bisphosphatase activity.

### Embodiment 29

[1375] The recombinant microorganism of any preceding embodiment, wherein the at least one enzyme having fructose 1,6-bisphosphatase activity is encoded by an amino acid sequence having at least 70% sequence identity, at least 80% sequence identity, or at least 90% sequence identity to fbp from E. coli.

### Embodiment 30

[1376] The recombinant microorganism of any preceding embodiment, wherein the one or more pentose and/or hexose sugars are capable of being converted to one or more intermediate in the non-oxidative pentose phosphate pathway of the recombinant microorganism.

### Embodiment 31

[1377] The recombinant microorganism of any preceding embodiment, wherein the one or more pentose and/or hexose sugars are comprised of monomers, oligomers, or a combination thereof.

### Embodiment 32

[1378] The recombinant microorganism of any preceding embodiment, wherein the expression of at least one enzyme having transketolase activity and/or fructose-6-phosphate phosphoketolase activity and the expression of at least one enzyme having pentose-phosphate aldolase activity enables a lossless conversion of one or more pentose and/or hexose sugars to D-ribose-5-phosphate intermediate and the subsequent conversion of D-ribose-5-phosphate to G3P and glycolaldehyde.

### Embodiment 33

[1379] The recombinant microorganism of an any preceding embodiment, wherein MEG or GA is produced through the conversion of glycolaldehyde in a C2 pathway and through the conversion of G3P in one or more C3 pathways.

### Embodiment 34

[1380] The recombinant microorganism of any preceding embodiment, wherein MEG is produced by the reduction of glycolaldehyde by an enzyme having glycolaldehyde reductase activity in the C2 pathway.

### Embodiment 35

[1381] The recombinant microorganism of any preceding embodiment, wherein GA is produced by the oxidation of glycolaldehyde by an enzyme having glycolaldehyde dehydrogenase activity in the C2 pathway.

### Embodiment 36

[1382] The recombinant microorganism of any preceding embodiment, wherein the at least one enzyme for the production of MEG or GA are selected from at least one enzyme having an activity selected from a 3-phosphoglycerate dehydrogenase activity, a phosphoserine aminotransferase activity, a serine transaminase activity, a 3-phosphohydroxypyruvate phosphatase activity, a phosphoserine phosphatase activity, a hydroxypyruvate decarboxylase activity, a 3-phosphohydroxypyruvate reductase activity, a glycolaldehyde reductase activity, a glycolaldehyde dehydrogenase activity, a serine oxidoreductase (deaminating) or serine-pyruvate aminotransferase activity, a serine decarboxylase activity, an ethanolamine aminotransferase or ethanolamine oxidoreductase (deaminating) activity, a glycerate decarboxylase activity, a hydroxypyruvate reductase activity, a 3-phosphoglycerate phosphatase activity, a 2-phosphoglycerate phosphatase activity, a glycerate 3-kinase activity, a glycerate 2-kinase activity, and a glyoxylate reductase activity.

### Embodiment 37

[1383] The recombinant microorganism of any preceding embodiment, wherein MEG is produced through the conversion of glycolaldehyde in a C2 pathway and one or more co-product is produced through the conversion of G3P in one or more C3 pathways.

### Embodiment 38

[1384] The recombinant microorganism of any preceding embodiment, wherein the at least one enzyme for the production of one or more co-product through the conversion of G3P in one or more C3 pathways are selected from at least one enzyme having an activity selected from a thiolase or acetyl coenzyme A acetyltransferase activity, an acetyl-CoA:acetoacetate transferase or acetate:acetoacetyl-CoA hydrolase activity, and an acetoacetate decarboxylase activity, and wherein the one or more co-product comprises acetone.

### Embodiment 39

[1385] The recombinant microorganism of any preceding embodiment, wherein the at least one enzyme for the production of one or more co-product through the conversion of G3P in one or more C3 pathways are selected from at least one enzyme having an activity selected from a thiolase or acetyl coenzyme A acetyltransferase activity, an acetyl-CoA:acetoacetate transferase or acetate:acetoacetyl-CoA hydrolase activity, an acetoacetate decarboxylase activity, and a secondary alcohol dehydrogenase activity, and wherein the one or more co-product comprises isopropanol.

### Embodiment 40

[1386] The recombinant microorganism of any preceding embodiment, wherein the at least one enzyme for the production of one or more co-product through the conversion of G3P in one or more C3 pathways are selected from at least one enzyme having an activity selected from a thiolase or acetyl coenzyme A acetyltransferase activity, an acetyl-CoA:acetoacetate transferase or acetate:acetoacetyl-CoA hydrolase activity, an acetoacetate decarboxylase activity, a secondary alcohol dehydrogenase activity, and a dehydratase activity, and wherein the one or more co-product comprises propene.

### Embodiment 41

[1387] The recombinant microorganism of any preceding embodiment, wherein the at least one enzyme for the production of one or more co-product through the conversion of G3P in one or more C3 pathways are selected from at least one enzyme having an activity selected from a thiolase or acetyl coenzyme A acetyltransferase activity, an acetyl-CoA:acetoacetate transferase or acetate:acetoacetyl-CoA hydrolase activity, an acetoacetate decarboxylase activity, a 3-hydroxyisovalerate (3HIV) synthase activity, a hydroxymethylglutaryl-CoA synthase activity, a methylglutaconyl-CoA hydratase activity, a methylcrotonyl-CoA carboxylase activity, a methylcrotonyl-CoA hydratase activity, a 3-hydroxyisovaleryl-CoA thioesterase activity, a 3HIV kinase activity, a 3HIV-3-phosphate decarboxylase activity, and a 3HIV decarboxylase activity, and wherein the one or more co-product comprises isobutene.

### Embodiment 42

[1388] The recombinant microorganism of any preceding embodiment, wherein the at least one enzyme for the production of one or more co-product through the conversion of G3P in one or more C3 pathways are selected from at least one enzyme having an activity selected from a 3-phosphoglycerate dehydrogenase activity, a phosphoserine aminotransferase activity, a 3-phosphohydroxypyruvate phosphatase activity, a phosphoserine phosphatase activity, a serine oxidoreductase (deaminating) or serine-pyruvate aminotransferase activity, a hydroxypyruvate reductase activity, a 3-phosphoglycerate phosphatase activity, a 2-phosphoglycerate phosphatase activity, a glycerate 3-kinase activity, and a glycerate 2-kinase activity, and wherein the one or more co-product comprises L-serine.

### Embodiment 43

[1389] The recombinant microorganism of any preceding embodiment, wherein the at least one enzyme for the production of one or more co-product through the conversion of G3P in one or more C3 pathways are selected from at least one enzyme having an activity selected from a serine hydroxymethyltransferase activity, a transferase activity, a formaldehyde dehydrogenase activity, a formate dehydrogenase activity, an activity associated with glycine cleavage system, a 3-phosphoglycerate dehydrogenase activity, a phosphoserine aminotransferase activity, a 3-phosphohydroxypyruvate phosphatase activity, a phosphoserine phosphatase activity, a serine transaminase activity, a hydroxypyruvate decarboxylase activity, a serine oxidoreductase (deaminating) activity, a serine decarboxylase activity, an ethanolamine aminotransferase or ethanolamine oxidoreductase (deaminating) activity, a hydroxypyruvate reductase activity, a 3-phosphoglycerate phosphatase activity, a 2-phosphoglycerate phosphatase activity, a glycerate 3-kinase activity, a glycerate 2-kinase activity, a glycolaldehyde dehydrogenase activity, a glycolate dehydrogenase activity, an alanine-glyoxylate aminotransferase activity, an alanine transaminase activity, an NAD(P)H dependent glutamate dehydrogenase activity, and wherein the one or more co-product comprises glycine.

### Embodiment 44

[1390] The recombinant microorganism of any preceding embodiment, wherein the activity associated with glycine cleavage system comprise an enzyme or protein selected from a glycine decarboxylase (P protein), an aminomethyltransferase (T protein), a dihydrolipoamide dehydrogenase (L protein), and an H protein.

### Embodiment 45

[1391] The recombinant microorganism of any preceding embodiment, wherein the at least one enzyme for the production of one or more co-product through the conversion of G3P in one or more C3 pathways are selected from at least one enzyme having an activity selected from a 3-phosphoglycerate dehydrogenase activity, a 3-phosphoserine aminotransferase activity, a 3-phosphohydroxypyruvate phosphatase activity, a phosphoserine phosphatase activity, a transaminase activity, a hydroxypyruvate decarboxylase activity, a serine oxidoreductase (deaminating) or serine-pyruvate aminotransferase activity, a serine decarboxylase activity, a hydroxypyruvate reductase activity, a 3-phosphoglycerate phosphatase activity, a 2-phosphoglycerate phosphatase activity, a glycerate 3-kinase activity, a glycerate 2-kinase activity, an acetaldehyde dehydrogenase activity, and an ethanolamine ammonia lyase activity, and wherein the one or more co-product comprises monoethanolamine (MEA).

### Embodiment 46

[1392] The recombinant microorganism of any preceding embodiment, wherein the at least one enzyme for the production of one or more co-product through the conversion of G3P in one or more C3 pathways are selected from at least one enzyme having an activity selected from a serine dehydrogenase activity, a 2-aminomalonate semialdehyde decarboxylase activity, an aminoacetaldehyde transaminase activity, a 2-aminomalonate semialdehyde transaminase activity, a 2,3-diaminopropanoate decarboxylase activity, a serine decarboxylase activity, an ethanolamine dehydrogenase activity, a serine hydroxymethyltransferase activity, an aldehyde oxidase activity, an N-acetyl transferase or O-acetyl transferase activity, an N-acetylserine dehydrogenase activity, a transaminase activity, a deacetylase activity, a serine aminase activity, and a 2,3-diaminopropanoate ammonia lyase activity, and wherein the one or more co-product comprises ethylenediamine (EDA).

### Embodiment 47

[1393] The recombinant microorganism of any preceding embodiment, wherein the recombinant microorganism further comprises one or more modifications to diminish or delete activity in a glycolaldehyde reductase, a glycolaldehyde dehydrogenase, a lactate dehydrogenase, or combination thereof.

### Embodiment 48

[1394] The recombinant microorganism of any preceding embodiment, wherein at least a portion of the excess NADH produced in the C3 pathway is used as a source of reducing equivalents in the C2 pathway.

### Embodiment 49

[1395] The recombinant microorganism of any preceding embodiment, wherein at least a portion of the excess NADH produced in the C3 pathway is used to produce ATP.

### Embodiment 50

[1396] The recombinant microorganism of any preceding embodiment, wherein excess biomass formation is minimized and production of MEG or GA or MEG and one or more co-product is maximized.

### Embodiment 51

[1397] A method of producing one or more products derived from glyceraldehyde-3-phosphate (G3P) and glycolaldehyde using a recombinant microorganism of any of the preceding Embodiments, wherein the method comprises cultivating the recombinant microorganism in a culture medium containing one or more pentose and/or hexose sugars providing a carbon source until the one or more products derived from glyceraldehyde-3-phosphate (G3P) and glycolaldehyde are produced.

### Embodiment 52

[1398] The method of any preceding embodiment, wherein the recombinant microorganism co-produces monoethylene glycol (MEG) and one or more co-products.

### Embodiment 53

[1399] The method of any preceding embodiment, wherein the one or more co-products are selected from acetone, isopropanol, propene, L-serine, glycine, monoethanolamine (MEA), ethylenediamine (EDA), or a combination thereof.

### Embodiment 54

[1400] The method of any preceding embodiment, wherein the one or more product is selected from monoethylene glycol (MEG) and glycolic acid (GA).

### Embodiment 55

[1401] A method of producing a recombinant microorganism that produces or accumulates one or more products derived from glyceraldehyde-3-phosphate (G3P) and glycolaldehyde from one or more pentose and/or hexose sugars via a D-ribose-5-phosphate intermediate, comprising:

introducing into or expressing in the recombinant microorganism one or more enzyme for the conversion of the one or more pentose and/or hexose sugars to the D-ribose-5-phosphate intermediate;
introducing into or expressing in the recombinant microorganism one or more enzyme for the conversion of the pentose-phosphate intermediate to G3P and glycolaldehyde;
introducing into or expressing in the recombinant microorganism one or more enzyme for the production of the one or more products from glycolaldehyde in a C2 pathway; and
introducing into or expressing in the recombinant microorganism one or more enzymes for the production of the one or more products from G3P in one or more C3 pathways; and
culturing the recombinant microorganism in a culture medium containing the one or more pentose and/or hexose sugars to produce or accumulate the one or more products.

### Embodiment 56

[1402] The method of any preceding embodiment, wherein the recombinant microorganism co-produces monoethylene glycol (MEG) and one or more co-products.

### Embodiment 57

[1403] The method of any preceding embodiment, wherein the one or more co-products are selected from acetone, isopropanol, propene, L-serine, glycine, monoethanolamine (MEA), ethylenediamine, or a combination thereof.

### Embodiment 58

[1404] The method of any preceding embodiment, wherein the one or more products is selected from monoethylene glycol (MEG) and glycolic acid (GA).

### Embodiment 59

[1405] The method of any preceding embodiment, wherein the glycolaldehyde is oxidized to glycolic acid by a glycoladehyde dehydrogenase.

### Embodiment 60

[1406] The method of any preceding embodiment, wherein the one or more enzyme for the conversion of the one or more pentose and/or hexose sugars to the pentose-phosphate intermediate are selected from one or more enzyme having a transketolase activity, a transaldolase activity, a ribulose-5-phosphate 3-epimerase activity and a ribose-5-phosphate isomerase activity.

### Embodiment 61

[1407] The method of any preceding embodiment, wherein the method further comprises introducing into the recombinant microorganism one or more modifications to diminish or delete activity in one or more endogenous enzymes selected from glyceraldehyde 3-phosphate dehydrogenase (gapA), phosphoglycerate kinase (pgk) and phosphoglycerate mutase (gpmA and/or gpmM).

### Embodiment 62

[1408] The method of any preceding embodiment, wherein the one or more enzyme for the conversion of the one or more pentose and/or hexose sugars to the pentose-phosphate intermediate are selected from one or more enzyme having a fructose-6-phosphate phosphoketolase activity, a phosphate acetyltransferase activity, a transketolase activity, a transaldolase activity, a ribulose-5-phosphate 3-epimerase activity and a ribose-5-phosphate isomerase activity.

### Embodiment 63

[1409] The method of any preceding embodiment, wherein the method further comprises introducing into the recombinant microorganism one or more modifications to diminish or delete activity in an endogenous 6-phosphofructokinase (pfkA and/or pfkB) enzyme.

### Embodiment 64

[1410] The method of any one of Embodiments 54-62, wherein the one or more enzyme for the conversion of the pentose-phosphate intermediate to G3P and glycolaldehyde is one or more enzyme having a D-ribose-5-phosphate aldolase activity.

### Embodiment 65

[1411] The method of any preceding embodiment, wherein the method further comprises: introducing into the recombinant microorganism one or more modifications to diminish or delete activity in one or more endogenous enzymes selected from glucose 6-phosphate-1-dehydrogenase, 6-phosphogluconolactonase, and 6-phosphogluconate dehydrogenase.

### Embodiment 66

[1412] The method of any preceding embodiment, wherein the glucose 6-phosphate-1-dehydrogenase is zwf, the 6-phosphogluconolactonase is pgl, and the 6-phosphogluconate dehydrogenase is gnd.

### Embodiment 67

[1413] The method of any preceding embodiment, wherein the one or more pentose and/or hexose sugars comprise D-xylose and the method further comprises:

introducing into or expressing in the recombinant microorganism one or more enzyme having xylose isomerase activity for the conversion of D-xylose to D-xylulose; and
introducing into or expressing in the recombinant microorganism one or more enzyme having xylulose 5-kinase activity for the conversion of D-xylulose to D-xylulose-5-phosphate.

### Embodiment 68

[1414] The method of any preceding embodiment, wherein the one or more pentose and/or hexose sugars comprise D-fructose and the recombinant microorganism further comprises: introducing into or expressing in the recombinant microorganism one or more enzyme having fructose 1,6-bisphosphatase activity for the conversion of D-fructose 1,6-bisphosphate to D-fructose 6-phosphate, wherein D-fructose is converted to fructose 1,6-bisphoshate by endogenous enzymes in the recombinant microorganism.

### Embodiment 69

[1415] The method of any preceding embodiment, wherein the one or more pentose and/or hexose sugars are capable of being converted to one or more intermediate in the non-oxidative pentose phosphate pathway of the recombinant microorganism.

### Embodiment 70

[1416] The method of any preceding embodiment, wherein the one or more pentose and/or hexose sugars are comprised of monomers, oligomers, or a combination thereof.

### Embodiment 71

[1417] The method of any preceding embodiment, wherein expression of one or more enzyme having transketolase activity and/or fructose-6-phosphate phosphoketolase activity and expression of one or more enzyme having pentose-phosphate aldolase activity enables a lossless conversion of one or more pentose and/or hexose sugars to pentose-phosphate intermediate and the subsequent conversion of D-ribose-5-phosphate to G3P and glycolaldehyde.

### Embodiment 72

[1418] The method of any preceding embodiment, wherein MEG or GA is produced through the conversion of glycolaldehyde in a C2 pathway and through the conversion of G3P in one or more C3 pathways.

### Embodiment 73

[1419] The method of any preceding embodiment, wherein MEG is produced by the reduction of glycolaldehyde by an enzyme having glycolaldehyde reductase activity.

### Embodiment 74

[1420] The method of any preceding embodiment, wherein GA is produced by the oxidation of glycolaldehyde by an enzyme having glycolaldehyde dehydrogenase activity.

### Embodiment 75

[1421] The method of any preceding embodiment, wherein the one or more enzyme for the production of MEG or GA are selected from one or more enzyme having an activity selected from a 3-phosphoglycerate dehydrogenase activity, a phosphoserine aminotransferase activity, a serine transaminase activity, a 3-phosphohydroxypyruvate phosphatase activity, a phosphoserine phosphatase activity, a hydroxypyruvate decarboxylase activity, a 3-phosphohydroxypyruvate reductase activity, a glycolaldehyde reductase activity, a glycolaldehyde dehydrogenase activity, a serine oxidoreductase (deaminating) or serine-pyruvate aminotransferase activity, a serine decarboxylase activity, an ethanolamine aminotransferase or ethanolamine oxidoreductase (deaminating) activity, a glycerate decarboxylase activity, a hydroxypyruvate reductase activity, a 3-phosphoglycerate phosphatase activity, a 2-phosphoglycerate phosphatase activity, a glycerate 3-kinase activity, a glycerate 2-kinase activity, and a glyoxylate reductase activity.

### Embodiment 76

[1422] The method of any preceding embodiment, wherein MEG is produced through the conversion of glycolaldehyde in a C2 pathway and one or more co-product is produced through the conversion of G3P in one or more C3 pathways.

### Embodiment 77

[1423] The method of any preceding embodiment, wherein the one or more enzyme for the production of the one or more co-product through the conversion of G3P in the one or more C3 pathways are selected from one or more enzyme having an activity selected from a thiolase or acetyl coenzyme A acetyltransferase activity, an acetyl-CoA:acetoacetate transferase or acetate:acetoacetyl-CoA hydrolase activity, and an acetoacetate decarboxylase activity, and wherein the one or more co-product comprises acetone.

### Embodiment 78

[1424] The method of any preceding embodiment, wherein the one or more enzyme for the production of the one or more co-product through the conversion of G3P in the one or more C3 pathways are selected from one or more enzyme having an activity selected from a thiolase or acetyl coenzyme A acetyltransferase activity, an acetyl-CoA:acetoacetate transferase or acetate:acetoacetyl-CoA hydrolase activity, an acetoacetate decarboxylase activity, and a secondary alcohol dehydrogenase activity, and wherein the one or more co-product comprises isopropanol.

### Embodiment 79

[1425] The method of any preceding embodiment, wherein one or more enzyme for the production of one or more co-product through the conversion of G3P in one or more C3 pathways are selected from one or more enzyme having an activity selected from a thiolase or acetyl coenzyme A acetyltransferase activity, an acetyl-CoA:acetoacetate transferase or acetate:acetoacetyl-CoA hydrolase activity, an acetoacetate decarboxylase activity, a secondary alcohol dehydrogenase activity, and a dehydratase activity, and wherein the one or more co-product comprises propene.

### Embodiment 80

[1426] The method of any preceding embodiment, wherein the one or more enzyme for the production of the one or more co-product through the conversion of G3P in the one or more C3 pathways are selected from one or more enzyme having an activity selected from a thiolase or acetyl coenzyme A acetyltransferase activity, an acetyl-CoA:acetoacetate transferase or acetate:acetoacetyl-CoA hydrolase activity, an acetoacetate decarboxylase activity, a 3-hydroxyisovalerate (3HIV) synthase activity, a hydroxymethylglutaryl-CoA synthase activity, a methylglutaconyl-CoA hydratase activity, a methylcrotonyl-CoA carboxylase activity, a methylcrotonyl-CoA hydratase activity, a 3-hydroxyisovaleryl-CoA thioesterase activity, a 3HIV kinase activity, a 3HIV-3-phosphate decarboxylase activity, and a 3HIV decarboxylase activity, and wherein the one or more co-product comprises isobutene.

### Embodiment 81

[1427] The method of any preceding embodiment, wherein the one or more enzyme for the production of the one or more co-product through the conversion of G3P in the one or more C3 pathways are selected from one or more enzyme having an activity selected from a 3-phosphoglycerate dehydrogenase activity, a phosphoserine aminotransferase activity, a 3-phosphohydroxypyruvate phosphatase activity, a phosphoserine phosphatase activity, a serine oxidoreductase (deaminating) or serine-pyruvate aminotransferase activity, a hydroxypyruvate reductase activity, a 3-phosphoglycerate phosphatase activity, a 2-phosphoglycerate phosphatase activity, a glycerate 3-kinase activity, and a glycerate 2-kinase activity, and wherein the one or more co-product comprises L-serine.

### Embodiment 82

[1428] The method of any preceding embodiment, wherein the one or more enzyme for the production of the one or more co-product through the conversion of G3P in one or more C3 pathways are selected from one or more enzyme having an activity selected from a serine hydroxymethyltransferase activity, a transferase activity, a formaldehyde dehydrogenase activity, a formate dehydrogenase activity, an activity associated with glycine cleavage system, a 3-phosphoglycerate dehydrogenase activity, a phosphoserine aminotransferase activity, a 3-phosphohydroxypyruvate phosphatase activity, a phosphoserine phosphatase activity, a serine transaminase activity, a hydroxypyruvate decarboxylase activity, a serine oxidoreductase (deaminating) activity, a serine decarboxylase activity, an ethanolamine aminotransferase or ethanolamine oxidoreductase (deaminating) activity, a hydroxypyruvate reductase activity, a 3-phosphoglycerate phosphatase activity, a 2-phosphoglycerate phosphatase activity, a glycerate 3-kinase activity, a glycerate 2-kinase activity, a glycolaldehyde dehydrogenase activity, a glycolate dehydrogenase activity, an alanine-glyoxylate aminotransferase activity, an alanine transaminase activity, an NAD(P)H dependent glutamate dehydrogenase activity, and wherein the one or more co-product comprises glycine.

### Embodiment 83

[1429] The method of any preceding embodiment, wherein the activity associated with glycine cleavage system comprise an enzyme or protein selected from a glycine decarboxylase (P protein), an aminomethyltransferase (T protein), a dihydrolipoamide dehydrogenase (L protein), and an H protein.

### Embodiment 84

[1430] The method of any preceding embodiment, wherein the one or more enzyme for the production of the one or more co-product through the conversion of G3P in the one or more C3 pathways are selected from one or more enzyme having an activity selected from a 3-phosphoglycerate dehydrogenase activity, a 3-phosphoserine aminotransferase activity, a 3-phosphohydroxypyruvate phosphatase activity, a phosphoserine phosphatase activity, a transaminase activity, a hydroxypyruvate decarboxylase activity, a serine oxidoreductase (deaminating) or serine-pyruvate aminotransferase activity, a serine decarboxylase activity, a hydroxypyruvate reductase activity, a 3-phosphoglycerate phosphatase activity, a 2-phosphoglycerate phosphatase activity, a glycerate 3-kinase activity, a glycerate 2-kinase activity, an acetaldehyde dehydrogenase activity, and an ethanolamine ammonia lyase activity, and wherein the one or more co-product comprises monoethanolamine (MEA).

### Embodiment 85

[1431] The method of any preceding embodiment, wherein the one or more enzyme for the production of the one or more co-product through the conversion of G3P in the one or more C3 pathways are selected from one or more enzyme having an activity selected from a serine dehydrogenase activity, a 2-aminomalonate semialdehyde decarboxylase activity, an aminoacetaldehyde transaminase activity, a 2-aminomalonate semialdehyde transaminase activity, a 2,3-diaminopropanoate decarboxylase activity, a serine decarboxylase activity, an ethanolamine dehydrogenase activity, a serine hydroxymethyltransferase activity, an aldehyde oxidase activity, an N-acetyl transferase or O-acetyl transferase activity, an N-acetylserine dehydrogenase activity, a transaminase activity, a deacetylase activity, a serine aminase activity, and a 2,3-diaminopropanoate ammonia lyase activity, and wherein the one or more co-product comprises ethylenediamine (EDA).

### Embodiment 86

[1432] The method of any preceding embodiment, wherein the method further comprises introducing into the recombinant microorganism one or more modifications to diminish or delete activity in a glycolaldehyde reductase, a glycolaldehyde dehydrogenase, a lactate dehydrogenase, or combination thereof.

### Embodiment 87

[1433] The method of any preceding embodiment, wherein at least a portion of the excess NADH produced in the C3 pathway is used as a source of reducing equivalents in the C2 pathway.

### Embodiment 88

[1434] The method of any preceding embodiment, wherein at least a portion of the excess NADH produced in the C3 pathway is used to produce ATP.

### Embodiment 89

[1435] The method of any preceding embodiment, wherein excess biomass formation is minimized and production of MEG or GA or MEG and one or more co-product is maximized.

What is claimed is:

1. A recombinant microorganism expressing at least one enzyme having pentose-phosphate aldolase activity wherein said microorganism produces one or more products derived from glyceraldehyde-3-phosphate (G3P) and glycolaldehyde from one or more pentose and/or hexose sugars via a pentose-phosphate intermediate; wherein the one or more product is selected from monoethylene glycol (MEG) and glycolic acid (GA) wherein the pentose-phosphate intermediate is D-ribose-5-phosphate, D-ribulose-5-phosphate or D-xylulose-5-phosphate and wherein the enzyme have D-ribose-5-phosphate, D-ribulose-5-phosphate or D-xylulose-5-phosphate aldolase activity.

2.-3. (canceled)

4. The recombinant microorganism of claim 1, wherein the recombinant microorganism co-produces monoethylene glycol (MEG) or glycolic acid (GA) and one or more co-products, wherein the one or more co-products are selected from acetone, isopropanol, propene, L-serine, glycine, monoethanolamine (MEA), ethylenediamine, or a combination thereof.

5. (canceled)

6. The recombinant microorganism of claim 1, wherein the microorganism comprises expression of at least one enzyme having transketolase activity, wherein the at least one enzyme having transketolase activity is encoded by an amino acid sequence having at least 70% sequence identity, at least 80% sequence identity, or at least 90% sequence identity to tktA or tktB from E. coli;
expression of at least one enzyme having transaldolase activity, wherein the at least one enzyme having transaldolase activity is encoded by an amino acid sequence having at least 70% sequence identity, at least 80% sequence identity, or at least 90% sequence identity to talA or talB from E. coli;
expression of at least one enzyme having ribulose-5-phosphate 3-epimerase activity, wherein the at least one enzyme having ribulose-5-phosphate 3-epimerase activity is encoded by an amino acid sequence having at least 70% sequence identity, at least 80% sequence identity, or at least 90% sequence identity to rpe from E. coli.

7. (canceled)

8. The recombinant microorganism of claim 1, wherein the at least one enzyme having pentose-phosphate aldolase activity is encoded by an amino acid sequence having at least 70% sequence identity, at least 80% sequence identity, or at least 90% sequence identity to SEQ ID NO: 256 of deoC from E. coli or SEQ ID NO: 298 of deoC from B. caldolyticus.

9. (canceled)

10. The recombinant microorganism of claim 8, wherein the deoC from E. coli comprises a cysteine to arginine mutation at position 47 (C47N).

11. The recombinant microorganism of claim 8, wherein the deoC from B. caldolyticus comprises a cysteine to arginine mutation at position 37 (C37N).

12.-15. (canceled)

16. The recombinant microorganism of claim 1, wherein the microorganism comprises expression of at least one enzyme having ribose-5-phosphate isomerase activity, wherein the at least one enzyme having ribose-5-phosphate isomerase activity is encoded by an amino acid sequence having at least 70% sequence identity, at least 80% sequence identity, or at least 90% sequence identity to rpiA or rpiB from E. coli.

17. (canceled)

18. The recombinant microorganism of claim 1, wherein the recombinant microorganism further comprises a deleted or diminished activity in one or more endogenous enzymes selected from glyceraldehyde 3-phosphate dehydrogenase, phosphoglycerate kinase and phosphoglycerate mutase, wherein the glyceraldehyde 3-phosphate dehydrogenase is gapA, the phosphoglycerate kinase is pgk and the phosphoglycerate mutase is gpmA and/or gpmM.

19. (canceled)

20. The recombinant microorganism of claim 1, further comprising expression of at least one enzyme having fructose-6-phosphate phosphoketolase activity, wherein the at least one enzyme having fructose-6-phosphate phosphoketolase activity is encoded by an amino acid sequence having at least 70% sequence identity, at least 80% sequence identity, or at least 90% sequence identity to an enzyme having fructose-6-phosphate phosphoketolase activity selected from Bifidobacterium dentium BDP_1006, Bifidobacterium lactis xfp, Lactobacillus paraplantarum xpkA and Bifidobacterium breve xfp, and
expression of at least one enzyme having phosphate acetyltransferase activity, wherein the at least one enzyme having phosphate acetyltransferase activity is encoded by an amino acid sequence having at least 70% sequence identity, at least 80% sequence identity, or at least 90% sequence identity to an enzyme having phosphate acetyltransferase activity selected from E. coli pta and Clostridium acetobutylicum pta.

21.-23. (canceled)

24. The recombinant microorganism of claim 1, wherein the recombinant microorganism further comprises a deleted or diminished activity in an endogenous 6-phosphofructokinase enzyme, wherein the 6-phosphofructokinase is pfkA and/or pfkB; and
wherein the recombinant microorganism further comprises a deleted or diminished activity in one or more endogenous enzymes selected from glucose 6-phosphate-1-dehydrogenase, 6-phosphogluconolactonase, and 6-phosphogluconate dehydrogenase, wherein the glucose 6-phosphate-1-dehydrogenase is zwf, the 6-phosphogluconolactonase is pgl, and the 6-phosphogluconate dehydrogenase is gnd.

25.-27. (canceled)

28. The recombinant microorganism of claim 1, wherein the one or more pentose and/or hexose sugars comprise D-xylose and the recombinant microorganism further comprises expression of at least one enzyme having xylose isomerase activity and expression of at least one enzyme having xylulose 5-kinase activity, wherein the at least one enzyme having xylose isomerase activity is encoded by an amino acid sequence having at least 70% sequence identity, at least 80% sequence identity, or at least 90% sequence identity to xylA from E. coli or Pyromyces sp; and wherein the at least one enzyme having xylulose 5-kinase activity is encoded by an amino acid sequence having at least 70% sequence identity, at least 80% sequence identity, or at least 90% sequence identity to xylB from E. coli.

29.-30. (canceled)

31. The recombinant microorganism of claim 1, wherein the one or more pentose and/or hexose sugars comprise D-fructose and the recombinant microorganism further comprises expression of at least one enzyme having fructose 1,6-bisphosphatase activity, wherein the at least one enzyme having fructose 1,6-bisphosphatase activity is encoded by an amino acid sequence having at least 70% sequence identity, at least 80% sequence identity, or at least 90% sequence identity to fbp from E. coli.

32. (canceled)

33. The recombinant microorganism of claim 1, wherein the one or more pentose and/or hexose sugars are capable of being converted to one or more intermediate in the non-oxidative pentose phosphate pathway of the recombinant microorganism, wherein the one or more pentose and/or hexose sugars are comprised of monomers, oligomers, or a combination thereof.

34. (canceled)

35. The recombinant microorganism of claim 1, wherein the expression of at least one enzyme having transketolase activity and/or fructose-6-phosphate phosphoketolase activity and the expression of at least one enzyme having D-ribose 5-phosphate aldolase activity enables a lossless conversion of one or more pentose and/or hexose sugars to D-ribose-5-phosphate intermediate and the subsequent conversion of D-ribose-5-phosphate to G3P and glycolaldehyde.

36. The recombinant microorganism of claim 1, wherein MEG or GA is produced through the conversion of glycolaldehyde in a C2 pathway and through the conversion of G3P in one or more C3 pathways, wherein MEG is produced by the reduction of glycolaldehyde by an enzyme having glycolaldehyde reductase activity in the C2 pathway and wherein GA is produced by the oxidation of glycolaldehyde by an enzyme having glycolaldehyde dehydrogenase activity in the C2 pathway.

37.-50. (canceled)

51. The recombinant microorganism of claim 1, wherein at least a portion of the excess NADH produced in the C3 pathway is used as a source of reducing equivalents in the C2 pathway and wherein at least a portion of the excess NADH produced in the C3 pathway is used to produce ATP.

52. (canceled)

53. The recombinant microorganism of claim 1, wherein excess biomass formation is minimized and production of MEG or/and GA and one or more co-product is maximized.

54. A method of producing one or more products derived from glyceraldehyde-3-phosphate (G3P) and glycolaldehyde using the recombinant microorganism of claim 1, wherein the method comprises cultivating the recombinant microorganism in a culture medium containing one or more pentose and/or hexose sugars providing a carbon source until the one or more products derived from glyceraldehyde-3-phosphate (G3P) and glycolaldehyde are produced, wherein the one or more product is selected from monoethylene glycol (MEG) and glycolic acid (GA), wherein the one or more product is selected from monoethylene glycol (MEG) and glycolic acid (GA).

55.-57. (canceled)

58. A method of producing a recombinant microorganism that produces or accumulates one or more products derived from glyceraldehyde-3-phosphate (G3P) and glycolaldehyde from one or more pentose and/or hexose sugars via a pentose-phosphate intermediate, comprising:
introducing into or expressing in the recombinant microorganism one or more enzyme for the conversion of the one or more pentose and/or hexose sugars to the pentose-phosphate intermediate;
introducing into or expressing in the recombinant microorganism one or more enzyme for the conversion of the D-ribose-5-phosphate intermediate to G3P and glycolaldehyde;
introducing into or expressing in the recombinant microorganism one or more enzyme for the production of the one or more products from glycolaldehyde in a C2 pathway; and
introducing into or expressing in the recombinant microorganism one or more enzymes for the production of the one or more products from G3P in one or more C3 pathways; and
culturing the recombinant microorganism in a culture medium containing the one or more pentose and/or hexose sugars to produce or accumulate the one or more products.

59.-92. (canceled)

The application's sequence listing, which the Patent Office published only in electronic form, follows.

SEQUENCE LISTING (299 sequences)

SEQ ID NO: 1 - DNA, 873 bp, Pseudomonas cichorii
gtgaacaaagttggcatgttctacacctactggtcgactgagtggatggtcgactttccggcgactgcgaagcgcattgccgggctcggcttcgacttaatggaaatctcgctcggcgagtttcacaatctttccgacgcgaagaagcgtgagctaaaagccgtggctgatgatctggggctcacggtgatgtgctgtatcggactgaagtctgagtacgactttgcctcgccggacaagagcgttcgtgatgccggcacggaatatgtgaagcgcttgctcgacgactgtcacctcctcggcgcgccggtctttgctggccttacgttctgcgcgtggccccaatctccgccgctggacatgaaggataagcgcccttacgtcgaccgtgcaatcgaaagcgttcgtcgtgttatcaaggtagctgaagactacggcattatttatgcactggaagtggtgaaccgattcgagcagtggctttgcaatgacgccaaggaagcaattgcgtttgccgacgcggttgacagtccggcgtgcaaggtccagctcgacacattccacatgaatatcgaagagacttccttccgcgatgcaatccttgcctgcaagggcaagatgggccatttccatttgggcgaagcgaaccgtctgccgccgggcgagggtcgcctgccgtgggatgaaatattcggggcgctgaaggaaatcggatatgacggcaccatcgttatggaaccgttcatgcgcaagggcggctcggtcagccgcgcggtgggcgtatggcgggatatgtcgaacggtgcgacggacgaagagatggacgagcgcgctcgccgctcgttgcagtttgttcgtgacaagctggcctga

SEQ ID NO: 2 - DNA, 873 bp, Artificial Sequence
  Codon Optimized Pseudomonas cichorii Sequence
atgaacaaagtgggtatgttctatacgtactggtccacggaatggatggttgactttccggcaaccgcgaaacgtattgcgggcctgggcttcgacctgatggaaatttctctgggcgaatttcacaacctgtccgatgcgaaaaagcgtgaactgaaagccgttgccgacgatctgggtctgactgtgatgtgctgtatcggcctgaaatctgaatacgatttcgcgagcccggataaaagcgttcgcgacgccggtactgaatatgtcaaacgtctgctggatgactgtcacctgctgggcgcaccagtgttcgcgggtctgaccttctgtgcgtggccgcagtccccaccgctggacatgaaggataaacgtccgtacgtggaccgtgccatcgaaagcgtgcgccgcgtaatcaaagtcgctgaagattatggcattatttacgctctggaagttgttaaccgtttcgaacagtggctgtgcaacgacgcgaaagaggccattgccttcgctgacgcggtggattctccggcttgcaaagttcagctggacactttccatatgaacatcgaggaaacctccttccgtgacgcgatcctggcttgcaagggtaaaatgggccatttccatctgggcgaagcaaaccgcctgccgccgggcgaaggtcgtctgccgtgggacgaaatttttggcgctctgaaggaaatcggctacgatggcacgattgttatggagccgttcatgcgcaaaggtggctccgtttcccgtgcagttggtgtttggcgtgatatgtctaacggtgccaccgatgaagaaatggacgaacgtgcacgtcgctccctgcaattcgttcgcgataaactggcgtaa

SEQ ID NO: 3 - protein, 290 aa, Pseudomonas cichorii
MNKVGMFYTYWSTEWMVDFPATAKRIAGLGFDLMEISLGEFHNLSDAKKRELKAVADDLGLTVMCCIGLKSEYDFASPDKSVRDAGTEYVKRLLDDCHLLGAPVFAGLTFCAWPQSPPLDMKDKRPYVDRAIESVRRVIKVAEDYGIIYALEVVNRFEQWLCNDAKEAIAFADAVDSPACKVQLDTFHMNIEETSFRDAILACKGKMGHFHLGEANRLPPGEGRLPWDEIFGALKEIGYDGTIVMEPFMRKGGSVSRAVGVWRDMSNGATDEEMDERARRSLQFVRDKLA

SEQ ID NO: 4 - DNA, 888 bp, Rhodobacter sphaeroides
gtgaaaaatcctgtcggcatcatctcgatgcagttcatccggcccttcacctcggagtcgctgcatttcctgaagaagtcccgggccctgggcttcgatttcatcgagcttctcgtgcccgagcccgaagacgggctcgacgcggccgaggtgcggcgcatctgcgagggcgaggggctgggcctcgttctggccgcgcgcgtgaacctccagcgctcgatcgcgagcgaggaggccgcggcgcgggccggcgggcgcgactatctgaaatactgcatcgaggccgccgaggcgctcggcgcgaccatcgtcggcggcccgctctatggcgagccgctggtcttcgccggccgcccgcccttcccctggacggccgagcagatcgccacccgcgccgcccgcaccgtcgaggggctggccgaagtggccccgctcgccgcgagcgcgggcaaggtcttcgggctcgagccgctgaaccgcttcgagaccgacatcgtgaacacgaccgcacaggccatcgaggtggtggatgcggtgggctcgcccggtctcggcgtcatgctcgacacgttccacatgaacatggaggaacgctcgatccccgatgcgatccgcgccacaggcgcgcgcctcgtccattttcaggccaacgagaaccaccgcggcttccccggcaccggcaccatggactggacggccatcgcgcgggcgctggggcaggcgggctacgcgggtccggtctcgctcgagcctttccggcgcgacgacgagcgcgtggcgctgcccatcgcccactggcgcgccccgcacgaggacgaggacgagaagctgcgcgcggggctgggtctcatccgctccgcgatcaccctggcggaggtgacccactga

SEQ ID NO: 5 - protein, 295 aa, Rhodobacter sphaeroides
MKNPVGIISMQFIRPFTSESLHFLKKSRALGFDFIELLVPEPEDGLDAAEVRRICEGEGLGLVLAARVNLQRSIASEEAAARAGGRDYLKYCIEAAEALGATIVGGPLYGEPLVFAGRPPFPWTAEQIATRAARTVEGLAEVAPLAASAGKVFGLEPLNRFETDIVNTTAQAIEVVDAVGSPGLGVMLDTFHMNMEERSIPDAIRATGARLVHFQANENHRGFPGTGTMDWTAIARALGQAGYAGPVSLEPFRRDDERVALPIAHWRAPHEDEDEKLRAGLGLIRSAITLAEVTH

SEQ ID NO: 6 - DNA, 1422 bp, Escherichia coli
atgatgaaacaagaagttatcctggtactcgactgtggcgcgaccaatgtcagggccatcgcggttaatcggcagggcaaaattgttgcccgcgcctcaacgcctaatgccagcgatatcgcgatggaaaacaacacctggcaccagtggtctttagacgccattttgcaacgctttgctgattgctgtcggcaaatcaatagtgaactgactgaatgccacatccgcggtatcgccgtcaccacctttggtgtggatggcgctctggtagataagcaaggcaatctgctctatccgattattagctggaaatgtccgcgaacagcagcggttatggacaatattgaacggttaatctccgcacagcggttgcaggctatttctggcgtcggagcctttagtttcaatacgttatataagttggtgtggttgaaagaaaatcatccacaactgctggaacgcgcgcacgcctggctctttatttcgtcgctgattaaccaccgtttaaccggcgaattcactactgatatcacgatggccggaaccagccagatgctggatatccagcaacgcgatttcagtccgcaaattttacaagccaccggtattccacgccgactcttccctcgtctggtggaagcgggtgaacagattggtacgctacagaacagcgccgcagcaatgctcggcttacccgttggcataccggtgatttccgcaggtcacgatacccagttcgccctttttggcgctggtgctgaacaaaatgaacccgtgctctcttccggtacatgggaaattttaatggttcgcagcgcccaggttgatacttcgctgttaagtcagtacgccggttccacctgcgaactggatagccaggcagggttgtataacccaggtatgcaatggctggcatccggcgtgctggaatgggtgagaaaactgttctggacggctgaaacaccctggcaaatgttgattgaagaagctcgtctgatcgcgcctggcgcggatggcgtaaaaatgcagtgtgatttattgtcgtgtcagaacgctggctggcaaggagtgacgcttaataccacgcgggggcatttctatcgcgcggcgctggaagggttaactgcgcaattacagcgcaatctacagatgctggaaaaaatcgggcactttaaggcctctgaattattgttagtcggtggaggaagtcgcaacacattgtggaatcagattaaagccaatatgcttgatattccggtaaaagttctcgacgacgccgaaacgaccgtcgcaggagctgcgctgttcggttggtatggcgtaggggaatttaacagcccggaagaagcccgcgcacagattcattatcagtaccgttatttctacccgcaaactgaacctgaatttatagaggaagtgtga

SEQ ID NO: 7 - DNA, 1422 bp, Artificial Sequence; identical to SEQ ID NO: 6
  Codon Optimized E. coli Sequence

SEQ ID NO: 8 - protein, 473 aa, Escherichia coli
MMKQEVILVLDCGATNVRAIAVNRQGKIVARASTPNASDIAMENNTWHQWSLDAILQRFADCCRQINSELTECHIRGIAVTTFGVDGALVDKQGNLLYPIISWKCPRTAAVMDNIERLISAQRLQAISGVGAFSFNTLYKLVWLKENHPQLLERAHAWLFISSLINHRLTGEFTTDITMAGTSQMLDIQQRDFSPQILQATGIPRRLFPRLVEAGEQIGTLQNSAAAMLGLPVGIPVISAGHDTQFALFGAGAEQNEPVLSSGTWEILMVRSAQVDTSLLSQYAGSTCELDSQAGLYNPGMQWLASGVLEWVRKLFWTAETPWQMLIEEARLIAPGADGVKMQCDLLSCQNAGWQGVTLNTTRGHFYRAALEGLTAQLQRNLQMLEKIGHFKASELLLVGGGSRNTLWNQIKANMLDIPVKVLDDAETTVAGAALFGWYGVGEFNSPEEARAQIHYQYRYFYPQTEPEFIEEV

SEQ ID NO: 9 - DNA, 648 bp, Escherichia coli
atggaacgaaataaacttgctcgtcagattattgacacttgcctggaaatgacccgcctgggactgaaccaggggacagcggggaacgtcagtgtacgttatcaggatgggatgctgattacgcctacaggcattccatatgaaaaactgacggagtcgcatattgtctttattgatggcaacggtaaacatgaggaaggaaagctcccctcaagcgaatggcgtttccatatggcagcctatcaaagcagaccggatgccaacgcggttgttcacaatcatgccgttcattgcacggcagtttccattcttaaccgatcgatccccgctattcactacatgattgcggcggctggcggtaattctattccttgcgcgccttatgcgacctttggaacacgcgaactttctgaacatgttgcgctggctctcaaaaatcgtaaggcaactttgttacaacatcatgggcttatcgcttgtgaggtgaatctggaaaaagcgttatggctggcgcatgaagttgaagtgctggcgcaactttacctgacgaccctggcgattacggacccggtgccagtgctgagcgatgaagagattgccgtagtgctggagaaattcaaaacctatgggttacgaattgaagagtaa

SEQ ID NO: 10 - DNA, 648 bp, Escherichia coli; identical to SEQ ID NO: 9

SEQ ID NO: 11 - protein, 215 aa, Escherichia coli
MERNKLARQIIDTCLEMTRLGLNQGTAGNVSVRYQDGMLITPTGIPYEKLTESHIVFIDGNGKHEEGKLPSSEWRFHMAAYQSRPDANAVVHNHAVHCTAVSILNRSIPAIHYMIAAAGGNSIPCAPYATFGTRELSEHVALALKNRKATLLQHHGLIACEVNLEKALWLAHEVEVLAQLYLTTLAITDPVPVLSDEEIAVVLEKFKTYGLRIEE

SEQ ID NO: 12 - DNA, 1104 bp, Escherichia coli
atggaccgcattattcaatcaccgggtaaatacatccagggcgctgatgtgattaatcgtctgggcgaatacctgaagccgctggcagaacgctggttagtggtgggtgacaaatttgttttaggttttgctcaatccactgtcgagaaaagctttaaagatgctggactggtagtagaaattgcgccgtttggcggtgaatgttcgcaaaatgagatcgaccgtctgcgtggcatcgcggagactgcgcagtgtggcgcaattctcggtatcggtggcggaaaaaccctcgatactgccaaagcactggcacatttcatgggtgttccggtagcgatcgcaccgactatcgcctctaccgatgcaccgtgcagcgcattgtctgttatctacaccgatgagggtgagtttgaccgctatctgctgttgccaaataacccgaatatggtcattgtcgacaccaaaatcgtcgctggcgcacctgcacgtctgttagcggcgggtatcggcgatgcgctggcaacctggtttgaagcgcgtgcctgctctcgtagcggcgcgaccaccatggcgggcggcaagtgcacccaggctgcgctggcactggctgaactgtgctacaacaccctgctggaagaaggcgaaaaagcgatgcttgctgccgaacagcatgtagtgactccggcgctggagcgcgtgattgaagcgaacacctatttgagcggtgttggttttgaaagtggtggtctggctgcggcgcacgcagtgcataacggcctgaccgctatcccggacgcgcatcactattatcacggtgaaaaagtggcattcggtacgctgacgcagctggttctggaaaatgcgccggtggaggaaatcgaaaccgtagctgcccttagccatgcggtaggtttgccaataactctcgctcaactggatattaaagaagatgtcccggcgaaaatgcgaattgtggcagaagcggcatgtgcagaaggtgaaaccattcacaacatgcctggcggcgcgacgccagatcaggtttacgccgctctgctggtagccgaccagtacggtcagcgtttcctgcaagagtgggaataa

SEQ ID NO: 13 - protein, 367 aa, Escherichia coli
MDRIIQSPGKYIQGADVINRLGEYLKPLAERWLVVGDKFVLGFAQSTVEKSFKDAGLVVEIAPFGGECSQNEIDRLRGIAETAQCGAILGIGGGKTLDTAKALAHFMGVPVAIAPTIASTDAPCSALSVIYTDEGEFDRYLLLPNNPNMVIVDTKIVAGAPARLLAAGIGDALATWFEARACSRSGATTMAGGKCTQAALALAELCYNTLLEEGEKAMLAAEQHVVTPALERVIEANTYLSGVGFESGGLAAAHAVHNGLTAIPDAHHYYHGEKVAFGTLTQLVLENAPVEEIETVAALSHAVGLPITLAQLDIKEDVPAKMRIVAEAACAEGETIHNMPGGATPDQVYAALLVADQYGQRFLQEWE

SEQ ID NO: 14 - DNA, 1029 bp, Saccharomyces cerevisiae
atgtcagttttcgtttcaggtgctaacgggttcattgcccaacacattgtcgatctcctgttgaaggaagactataaggtcatcggttctgccagaagtcaagaaaaggccgagaatttaacggaggcctttggtaacaacccaaaattctccatggaagttgtcccagacatatctaagctggacgcatttgaccatgttttccaaaagcacggcaaggatatcaagatagttctacatacggcctctccattctgctttgatatcactgacagtgaacgcgatttattaattcctgctgtgaacggtgttaagggaattctccactcaattaaaaaatacgccgctgattctgtagaacgtgtagttctcacctcttcttatgcagctgtgttcgatatggcaaaagaaaacgataagtctttaacatttaacgaagaatcctggaacccagctacctgggagagttgccaaagtgacccagttaacgcctactgtggttctaagaagtttgctgaaaaagcagcttgggaatttctagaggagaatagagactctgtaaaattcgaattaactgccgttaacccagtttacgtttttggtccgcaaatgtttgacaaagatgtgaaaaaacacttgaacacatcttgcgaactcgtcaacagcttgatgcatttatcaccagaggacaagataccggaactatttggtggatacattgatgttcgtgatgttgcaaaggctcatttagttgccttccaaaagagggaaacaattggtcaaagactaatcgtatcggaggccagatttactatgcaggatgttctcgatatccttaacgaagacttccctgttctaaaaggcaatattccagtggggaaaccaggttctggtgctacccataacacccttggtgctactcttgataataaaaagagtaagaaattgttaggtttcaagttcaggaacttgaaagagaccattgacgacactgcctcccaaattttaaaatttgagggcagaatataa

SEQ ID NO: 15 - protein, 342 aa, Saccharomyces cerevisiae
MSVFVSGANGFIAQHIVDLLLKEDYKVIGSARSQEKAENLTEAFGNNPKFSMEVVPDISKLDAFDHVFQKHGKDIKIVLHTASPFCFDITDSERDLLIPAVNGVKGILHSIKKYAADSVERVVLTSSYAAVFDMAKENDKSLTFNEESWNPATWESCQSDPVNAYCGSKKFAEKAAWEFLEENRDSVKFELTAVNPVYVFGPQMFDKDVKKHLNTSCELVNSLMHLSPEDKIPELFGGYIDVRDVAKAHLVAFQKRETIGQRLIVSEARFTMQDVLDILNEDFPVLKGNIPVGKPGSGATHNTLGATLDNKKSKKLLGFKFRNLKETIDDTASQILKFEGRI

SEQ ID NO: 16 - DNA, 984 bp, Saccharomyces cerevisiae
atgtcttcactggttactcttaataacggtctgaaaatgcccctagtcggcttagggtgctggaaaattgacaaaaaagtctgtgcgaatcaaatttatgaagctatcaaattaggctaccgtttattcgatggtgcttgcgactacggcaacgaaaaggaagttggtgaaggtatcaggaaagccatctccgaaggtcttgtttctagaaaggatatatttgttgtttcaaagttatggaacaattttcaccatcctgatcatgtaaaattagctttaaagaagaccttaagcgatatgggacttgattatttagacctgtattatattcacttcccaatcgccttcaaatatgttccatttgaagagaaataccctccaggattctatacgggcgcagatgacgagaagaaaggtcacatcaccgaagcacatgtaccaatcatagatacgtaccgggctctggaagaatgtgttgatgaaggcttgattaagtctattggtgtttccaactttcagggaagcttgattcaagatttattacgtggttgtagaatcaagcccgtggctttgcaaattgaacaccatccttatttgactcaagaacacctagttgagttttgtaaattacacgatatccaagtagttgcttactcctccttcggtcctcaatcattcattgagatggacttacagttggcaaaaaccacgccaactctgttcgagaatgatgtaatcaagaaggtctcacaaaaccatccaggcagtaccacttcccaagtattgcttagatgggcaactcagagaggcattgccgtcattccaaaatcttccaagaaggaaaggttacttggcaacctagaaatcgaaaaaaagttcactttaacggagcaagaattgaaggatatttctgcactaaatgccaacatcagatttaatgatccatggacctggttggatggtaaattccccacttttgcctga

SEQ ID NO: 17 - protein, 327 aa, Saccharomyces cerevisiae
MSSLVTLNNGLKMPLVGLGCWKIDKKVCANQIYEAIKLGYRLFDGACDYGNEKEVGEGIRKAISEGLVSRKDIFVVSKLWNNFHHPDHVKLALKKTLSDMGLDYLDLYYIHFPIAFKYVPFEEKYPPGFYTGADDEKKGHITEAHVPIIDTYRALEECVDEGLIKSIGVSNFQGSLIQDLLRGCRIKPVALQIEHHPYLTQEHLVEFCKLHDIQVVAYSSFGPQSFIEMDLQLAKTTPTLFENDVIKKVSQNHPGSTTSQVLLRWATQRGIAVIPKSSKKERLLGNLEIEKKFTLTEQELKDISALNANIRFNDPWTWLDGKFPTFA

SEQ ID NO: 18 - DNA, 1164 bp, Escherichia coli
atgaacaactttaatctgcacaccccaacccgcattctgtttggtaaaggcgcaatcgctggtttacgcgaacaaattcctcacgatgctcgcgtattgattacctacggcggcggcagcgtgaaaaaaaccggcgttctcgatcaagttctggatgccctgaaaggcatggacgtgctggaatttggcggtattgagccaaacccggcttatgaaacgctgatgaacgccgtgaaactggttcgcgaacagaaagtgactttcctgctggcggttggcggcggttctgtactggacggcaccaaatttatcgccgcagcggctaactatccggaaaatatcgatccgtggcacattctgcaaacgggcggtaaagagattaaaagcgccatcccgatgggctgtgtgctgacgctgccagcaaccggttcagaatccaacgcagaagcggtgatctcccgtaaaaccacaggcgacaagcaggcgttccattctgcccatgttcagccggtatttgccgtgctcgatccggtttatacctacaccctgccgccgcgtcaggtggctaacggcgtagtggacgcctttgtacacaccgtggaacagtatgttaccaaaccggttgatgccaaaattcaggaccgtttcgcagaaggcattttgctgacgctaatcgaagatggtccgaaagccctgaaagagccagaaaactacgatgtgcgcgccaacgtcatgtgggcggcgactcaggcgctgaacggtttgattggcgctggcgtaccgcaggactgggcaacgcatatgctgggccacgaactgactgcgatgcacggtctggatcacgcgcaaacactggctatcgtcctgcctgcactgtggaatgaaaaacgcgataccaagcgcgctaagctgctgcaatatgctgaacgcgtctggaacatcactgaaggttccgatgatgagcgtattgacgccgcgattgccgcaacccgcaatttctttgagcaattaggcgtgccgacccacctctccgactacggtctggacggcagctccatcccggctttgctgaaaaaactggaagagcacggcatgacccaactgggcgaaaatcatgacattacgttggatgtcagccgccgtatatacgaagccgcccgctaa

SEQ ID NO: 19 - DNA, 1167 bp, Artificial Sequence
  Codon Optimized E. coli Sequence
atgaacaattttaatttgcatactccaactagaatattatttggaaaaggtgcaattgcaggtttaagggaacaaataccacatgatgcaagggtattaatcacatacggtggtggttctgtcaagaaaactggtgtattggatcaagtattggatgctttaaagggtatggatgtcttggaatttggaggaatcgaaccaaaccctgcttacgagactttaatgaatgctgtcaaattggtcagagaacaaaaggtaacattcttattggctgttggaggtggatcagtattagatggtacaaagttcattgctgctgcagcaaattatccagaaaacattgatccatggcatatattgcaaactggtggtaaggaaataaagtcagctatcccaatgggatgtgttttgacattgcctgcaacaggatcagaatcaaacgctgaagcagtcatctcaagaaagactacaggtgacaaacaggcattccattctgcccatgtccaacctgtatttgctgttttagaccctgtatacacttacacattaccaccaaggcaagtcgcaaatggagttgtcgatgcctttgttcacactgtagaacagtacgtcaccaaaccagtcgatgcaaagatccaggacaggtttgcagaaggtattttattgacattaatcgaagatggaccaaaagcattgaaagagccagagaactatgacgttagggcaaatgttatgtgggctgctacccaggcattgaacggtttaattggtgcaggagttccacaagattgggctacacacatgttgggtcacgagttgaccgccatgcacggtttggaccatgcacagactttagccattgttttgcctgccttatggaacgagaaaagagatactaagagggctaagttattacaatacgctgaaagggtttggaatatcaccgagggatctgatgatgaaaggattgatgccgctattgcagccactagaaacttctttgaacaattaggtgttccaactcacttgtctgactatggtttagatggatcatctattccagctttgttgaagaaattggaagagcacggtatgacccagttgggtgagaatcatgatataaccttagatgtatctaggagaatctacgaggctgctagataatga

SEQ ID NO: 20 - protein, 387 aa, Escherichia coli
MNNFNLHTPTRILFGKGAIAGLREQIPHDARVLITYGGGSVKKTGVLDQVLDALKGMDVLEFGGIEPNPAYETLMNAVKLVREQKVTFLLAVGGGSVLDGTKFIAAAANYPENIDPWHILQTGGKEIKSAIPMGCVLTLPATGSESNAEAVISRKTTGDKQAFHSAHVQPVFAVLDPVYTYTLPPRQVANGVVDAFVHTVEQYVTKPVDAKIQDRFAEGILLTLIEDGPKALKEPENYDVRANVMWAATQALNGLIGAGVPQDWATHMLGHELTAMHGLDHAQTLAIVLPALWNEKRDTKRAKLLQYAERVWNITEGSDDERIDAAIAATRNFFEQLGVPTHLSDYGLDGSSIPALLKKLEEHGMTQLGENHDITLDVSRRIYEAAR

SEQ ID NO: 21 - DNA, 1164 bp, Escherichia coli
atgaacaactttaatctgcacaccccaacccgcattctgtttggtaaaggcgcaatcgctggtttacgcgaacaaattcctcacgatgctcgcgtattgattacctacggcggcggcagcgtgaaaaaaaccggcgttctcgatcaagttctggatgccctgaaaggcatggacgtgctggaatttggcggtattgagccaaacccggcttatgaaacgctgatgaacgccgtgaaactggttcgcgaacagaaagtgactttcctgctggcggttggcggcggttctgtactggacggcaccaaatttatcgccgcagcggctaactatccggaaaatatcgatccgtggcacattctgcaaacgggcggtaaagagattaaaagcgccatcccgatgggctgtgtgctgacgctgccagcaaccggttcagaatccaacgcaggcgcggtgatctcccgtaaaaccacaggcgacaagcaggcgttccattctgcccatgttcagccggtatttgccgtgctcgatccggtttatacctacaccctgccgccgcgtcaggtggctaacggcgtagtggacgcctttgtacacaccgtggaacagtatgttaccaaaccggttgatgccaaaattcaggaccgtttcgcagaaggcattttgctgacgctaatcgaagatggtccgaaagccctgaaagagccagaaaactacgatgtgcgcgccaacgtcatgtgggcggcgactcaggcgctgaacggtttgattggcgctggcgtaccgcaggactgggcaacgcatatgctgggccacgaactgactgcgatgcacggtctggatcacgcgcaaacactggctatcgtcctgcctgcactgtggaatgaaaaacgcgataccaagcgcgctaagctgctgcaatatgctgaacgcgtctggaacatcactgaaggttccgatgatgagcgtattgacgccgcgattgccgcaacccgcaatttctttgagcaattaggcgtgccgacccacctctccgactacggtctggacggcagctccatcccggctttgctgaaaaaactggaagagcacggcatgacccaactgggcgaaaatcatgacattacgttggatgtcagccgccgtatatacgaagccgcccgctaa

SEQ ID NO: 22 - DNA, 1164 bp, Artificial Sequence; identical to SEQ ID NO: 21
  Codon Optimized E. coli Sequence

SEQ ID NO: 23 - protein, 387 aa, Escherichia coli
MNNFNLHTPTRILFGKGAIAGLREQIPHDARVLITYGGGSVKKTGVLDQVLDALKGMDVLEFGGIEPNPAYETLMNAVKLVREQKVTFLLAVGGGSVLDGTKFIAAAANYPENIDPWHILQTGGKEIKSAIPMGCVLTLPATGSESNAGAVISRKTTGDKQAFHSAHVQPVFAVLDPVYTYTLPPRQVANGVVDAFVHTVEQYVTKPVDAKIQDRFAEGILLTLIEDGPKALKEPENYDVRANVMWAATQALNGLIGAGVPQDWATHMLGHELTAMHGLDHAQTLAIVLPALWNEKRDTKRAKLLQYAERVWNITEGSDDERIDAAIAATRNFFEQLGVPTHLSDYGLDGSSIPALLKKLEEHGMTQLGENHDITLDVSRRIYEAAR

SEQ ID NO: 24 - DNA, 981 bp, Escherichia coli
atgaaaaagatacctttaggcacaacggatattacgctttcgcgaatggggttggggacatgggccattggcggcggtcctgcatggaatggcgatctcgatcggcaaatatgtattgatacgattcttgaagcccatcgttgtggcattaatctgattgatactgcgccaggatataactttggcaatagtgaagttatcgtcggtcaggcgttaaaaaaactgccccgtgaacaggttgtagtagaaaccaaatgcggcattgtctgggaacgaaaaggaagtttattcaacaaagttggcgatcggcagttgtataaaaacctttccccggaatctatccgcgaagaggtagcagcgagcttgcaacgtctgggtattgattacatcgatatctacatgacgcactggcagtcggtgccgccattttttacgccgatcgctgaaactgtcgcagtgcttaatgagttaaagtctgaagggaaaattcgcgctataggcgctgctaacgtcgatgctgaccatatccgcgagtatctgcaatatggtgaactggatattattcaggcgaaatacagtatcctcgaccgggcaatggaaaacgaactgctgccactatgtcgtgataatggcattgtggttcaggtttattccccgctagagcagggattgttgaccggcaccatcactcgtgattacgttccgggcggcgctcgggcaaataaagtctggttccagcgtgaaaacatgctgaaagtgattgatatgcttgaacagtggcagccactttgtgctcgttatcagtgcacaattcccactctggcactggcgtggatattaaaacagagtgatttaatctccattcttagtggggctactgcaccggaacaggtacgcgaaaatgtcgcggcactgaatatcaacttatcggatgcagacgcaacattgatgagggaaatggcagaggccctggagcgttaa

SEQ ID NO: 25 - protein, 326 aa, Escherichia coli
MKKIPLGTTDITLSRMGLGTWAIGGGPAWNGDLDRQICIDTILEAHRCGINLIDTAPGYNFGNSEVIVGQALKKLPREQVVVETKCGIVWERKGSLFNKVGDRQLYKNLSPESIREEVAASLQRLGIDYIDIYMTHWQSVPPFFTPIAETVAVLNELKSEGKIRAIGAANVDADHIREYLQYGELDIIQAKYSILDRAMENELLPLCRDNGIVVQVYSPLEQGLLTGTITRDYVPGGARANKVWFQRENMLKVIDMLEQWQPLCARYQCTIPTLALAWILKQSDLISILSGATAPEQVRENVAALNINLSDADATLMREMAEALER

SEQ ID NO: 26 - DNA, 1149 bp, Escherichia coli
atggctaacagaatgattctgaacgaaacggcatggtttggtcggggtgctgttggggctttaaccgatgaggtgaaacgccgtggttatcagaaggcgctgatcgtcaccgataaaacgctggtgcaatgcggcgtggtggcgaaagtgaccgataagatggatgctgcagggctggcatgggcgatttacgacggcgtagtgcccaacccaacaattactgtcgtcaaagaagggctcggtgtattccagaatagcggcgcggattacctgatcgctattggtggtggttctccacaggatacttgtaaagcgattggcattatcagcaacaacccggagtttgccgatgtgcgtagcctggaagggctttccccgaccaataaacccagtgtaccgattctggcaattcctaccacagcaggtactgcggcagaagtgaccattaactacgtgatcactgacgaagagaaacggcgcaagtttgtttgcgttgatccgcatgatatcccgcaggtggcgtttattgacgctgacatgatggatggtatgcctccagcgctgaaagctgcgacgggtgtcgatgcgctcactcatgctattgaggggtatattacccgtggcgcgtgggcgctaaccgatgcactgcacattaaagcgattgaaatcattgctggggcgctgcgaggatcggttgctggtgataaggatgccggagaagaaatggcgctcgggcagtatgttgcgggtatgggcttctcgaatgttgggttagggttggtgcatggtatggcgcatccactgggcgcgttttataacactccacacggtgttgcgaacgccatcctgttaccgcatgtcatgcgttataacgctgactttaccggtgagaagtaccgcgatatcgcgcgcgttatgggcgtgaaagtggaaggtatgagcctggaagaggcgcgtaatgccgctgttgaagcggtgtttgctctcaaccgtgatgtcggtattccgccacatttgcgtgatgttggtgtacgcaaggaagacattccggcactggcgcaggcggcactggatgatgtttgtaccggtggcaacccgcgtgaagcaacgcttgaggatattgtagagctttaccataccgcctggtaa

SEQ ID NO: 27 - DNA, 1149 bp, Artificial Sequence; identical to SEQ ID NO: 26
  Codon Optimized E. coli Sequence

SEQ ID NO: 28 - protein, 382 aa, Escherichia coli
MANRMILNETAWFGRGAVGALTDEVKRRGYQKALIVTDKTLVQCGVVAKVTDKMDAAGLAWAIYDGVVPNPTITVVKEGLGVFQNSGADYLIAIGGGSPQDTCKAIGIISNNPEFADVRSLEGLSPTNKPSVPILAIPTTAGTAAEVTINYVITDEEKRRKFVCVDPHDIPQVAFIDADMMDGMPPALKAATGVDALTHAIEGYITRGAWALTDALHIKAIEIIAGALRGSVAGDKDAGEEMALGQYVAGMGFSNVGLGLVHGMAHPLGAFYNTPHGVANAILLPHVMRYNADFTGEKYRDIARVMGVKVEGMSLEEARNAAVEAVFALNRDVGIPPHLRDVGVRKEDIPALAQAALDDVCTGGNPREATLEDIVELYHTAW

SEQ ID NO: 29 - DNA, 804 bp, Escherichia coli
atggctatccctgcatttggtttaggtactttccgtctgaaagacgacgttgttatttcatctgtgataacggcgcttgaacttggttatcgcgcaattgataccgcacaaatctatgataacgaagccgcagtaggtcaggcgattgcagaaagtggcgtgccacgtcatgaactctacatcaccactaaaatctggattgaaaatctcagcaaagacaaattgatcccaagtctgaaagagagcctgcaaaaattgcgtaccgattatgttgatctgacgctaatccactggccgtcaccaaacgatgaagtctctgttgaagagtttatgcaggcgctgctggaagccaaaaaacaagggctgacgcgtgagatcggtatttccaacttcacgatcccgttgatggaaaaagcgattgctgctgttggtgctgaaaacatcgctactaaccagattgaactctctccttatctgcaaaaccgtaaagtggttgcctgggctaaacagcacggcatccatattacttcctatatgacgctggcgtatggtaaggccctgaaagatgaggttattgctcgtatcgcagctaaacacaatgcgactccggcacaagtgattctggcgtgggctatgggggaaggttactcagtaattccttcttctactaaacgtaaaaacctggaaagtaatcttaaggcacaaaatttacagcttgatgccgaagataaaaaagcgatcgccgcactggattgcaacgaccgcctggttagcccggaaggtctggctcctgaatgggattaa

SEQ ID NO: 30 - protein, 267 aa, Escherichia coli
MAIPAFGLGTFRLKDDVVISSVITALELGYRAIDTAQIYDNEAAVGQAIAESGVPRHELYITTKIWIENLSKDKLIPSLKESLQKLRTDYVDLTLIHWPSPNDEVSVEEFMQALLEAKKQGLTREIGISNFTIPLMEKAIAAVGAENIATNQIELSPYLQNRKVVAWAKQHGIHITSYMTLAYGKALKDEVIARIAAKHNATPAQVILAWAMGEGYSVIPSSTKRKNLESNLKAQNLQLDAEDKKAIAALDCNDRLVSPEGLAPEWD

SEQ ID NO: 31 - DNA, 828 bp, Escherichia coli
atggctaatccaaccgttattaagctacaggatggcaatgtcatgccccagctgggactgggcgtctggcaagcaagtaatgaggaagtaatcaccgccattcaaaaagcgttagaagtgggttatcgctcgattgataccgccgcggcctacaagaacgaagaaggtgtcggcaaagccctgaaaaatgcctcagtcaacagagaagaactgttcatcaccactaagctgtggaacgacgaccacaagcgcccccgcgaagccctgctcgacagcctgaaaaaactccagcttgattatatcgacctctacttaatgcactggcccgttcccgctatcgaccattatgtcgaagcatggaaaggcatgatcgaattgcaaaaagagggattaatcaaaagcatcggcgtgtgcaacttccagatccatcacctgcaacgcctgattgatgaaactggcgtgacgcctgtgataaaccagatcgaacttcatccgctgatgcaacaacgccagctacacgcctggaacgcgacacacaaaatccagaccgaatcctggagcccattagcgcaaggagggaaaggcgttttcgatcagaaagtcattcgcgatctggcagataaatacggcaaaaccccggcgcagattgttatccgctggcatctggatagcggcctggtggtgatcccgaaatcggtcacaccttcacgtattgccgaaaactttgatgtctgggatttccgtctcgacaaagacgaactcggcgaaattgcaaaactcgatcagggcaagcgtctcggtcccgatcctgaccagttcggcggctaa

SEQ ID NO: 32 - protein, 275 aa, Escherichia coli
MANPTVIKLQDGNVMPQLGLGVWQASNEEVITAIQKALEVGYRSIDTAAAYKNEEGVGKALKNASVNREELFITTKLWNDDHKRPREALLDSLKKLQLDYIDLYLMHWPVPAIDHYVEAWKGMIELQKEGLIKSIGVCNFQIHHLQRLIDETGVTPVINQIELHPLMQQRQLHAWNATHKIQTESWSPLAQGGKGVFDQKVIRDLADKYGKTPAQIVIRWHLDSGLVVIPKSVTPSRIAENFDVWDFRLDKDELGEIAKLDQGKRLGPDPDQFGG

SEQ ID NO: 33 - DNA, 1179 bp, Clostridium acetobutylicum
atgaaagaagttgtaatagctagtgcagtaagaacagcgattggatcttatggaaagtctcttaaggatgtaccagcagtagatttaggagctacagctataaaggaagcagttaaaaaagcaggaataaaaccagaggatgttaatgaagtcattttaggaaatgttcttcaagcaggtttaggacagaatccagcaagacaggcatcttttaaagcaggattaccagttgaaattccagctatgactattaataaggtttgtggttcaggacttagaacagttagcttagcagcacaaattataaaagcaggagatgctgacgtaataatagcaggtggtatggaaaatatgtctagagctccttacttagcgaataacgctagatggggatatagaatgggaaacgctaaatttgttgatgaaatgatcactgacggattgtgggatgcatttaatgattaccacatgggaataacagcagaaaacatagctgagagatggaacatttcaagagaagaacaagatgagtttgctcttgcatcacaaaaaaaagctgaagaagctataaaatcaggtcaatttaaagatgaaatagttcctgtagtaattaaaggcagaaagggagaaactgtagttgatacagatgagcaccctagatttggatcaactatagaaggacttgcaaaattaaaacctgccttcaaaaaagatggaacagttacagctggtaatgcatcaggattaaatgactgtgcagcagtacttgtaatcatgagtgcagaaaaagctaaagagcttggagtaaaaccacttgctaagatagtttcttatggttcagcaggagttgacccagcaataatgggatatggacctttctatgcaacaaaagcagctattgaaaaagcaggttggacagttgatgaattagatttaatagaatcaaatgaagcttttgcagctcaaagtttagcagtagcaaaagatttaaaatttgatatgaataaagtaaatgtaaatggaggagctattgcccttggtcatccaattggagcatcaggtgcaagaatactcgttactcttgtacacgcaatgcaaaaaagagatgcaaaaaaaggcttagcaactttatgtataggtggcggacaaggaacagcaatattgctagaaaagtgctag

SEQ ID NO: 34 - DNA, 1179 bp, Artificial Sequence
  Codon Aoptimized Clostridium acetobutylicum Sequence
atgaaagaagttgttattgcgagcgcggttcgtaccgcgattggcagctatggcaagagcctgaaggatgttccggcggtggacctgggtgcgaccgcgatcaaagaggcggttaagaaagcgggcattaaaccggaggatgtgaacgaagttatcctgggtaacgtgctgcaagcgggtctgggccaaaacccggcgcgtcaggcgagcttcaaggcgggcctgccggttgaaatcccggcgatgaccattaacaaagtttgcggtagcggcctgcgtaccgtgagcctggcggcgcaaatcattaaggcgggtgacgcggatgttatcattgcgggtggcatggagaacatgagccgtgcgccgtacctggcgaacaacgcgcgttggggttatcgtatgggcaacgcgaaattcgtggacgaaatgattaccgacggtctgtgggatgcgtttaacgactaccacatgggcatcaccgcggagaacattgcggaacgttggaacattagccgtgaggaacaagatgagttcgcgctggcgagccagaagaaagcggaggaagcgatcaagagcggccagtttaaagacgaaatcgttccggtggttattaagggtcgtaagggtgaaaccgtggtggacaccgatgaacacccgcgtttcggtagcaccattgagggcctggcgaagctgaaaccggcgtttaagaaagatggcaccgtgaccgcgggtaacgcgagcggcctgaacgactgcgcggcggtgctggttatcatgagcgcggagaaggcgaaagaactgggtgtgaagccgctggcgaaaattgttagctacggtagcgcgggtgtggacccggcgatcatgggttacggcccgttttatgcgaccaaggcggcgattgagaaagcgggttggaccgtggacgaactggatctgatcgagagcaacgaagcgttcgcggcgcaaagcctggcggtggcgaaggatctgaaatttgacatgaacaaggtgaacgtgaacggtggtgcgattgcgctgggtcacccgattggtgcgagcggcgcgcgtatcctggtgaccctggttcacgcgatgcagaaacgtgacgcgaagaaaggtctggcgaccctgtgcattggtggtggtcaaggcaccgcgattctgctggaaaagtgctaa

SEQ ID NO: 35 - protein, 392 aa, Clostridium acetobutylicum
MKEVVIASAVRTAIGSYGKSLKDVPAVDLGATAIKEAVKKAGIKPEDVNEVILGNVLQAGLGQNPARQASFKAGLPVEIPAMTINKVCGSGLRTVSLAAQIIKAGDADVIIAGGMENMSRAPYLANNARWGYRMGNAKFVDEMITDGLWDAFNDYHMGITAENIAERWNISREEQDEFALASQKKAEEAIKSGQFKDEIVPVVIKGRKGETVVDTDEHPRFGSTIEGLAKLKPAFKKDGTVTAGNASGLNDCAAVLVIMSAEKAKELGVKPLAKIVSYGSAGVDPAIMGYGPFYATKAAIEKAGWTVDELDLIESNEAFAAQSLAVAKDLKFDMNKVNVNGGAIALGHPIGASGARILVTLVHAMQKRDAKKGLATLCIGGGQGTAILLEKC

SEQ ID NO: 36 - DNA, 1185 bp, Escherichia coli
atgaaaaattgtgtcatcgtcagtgcggtacgtactgctatcggtagttttaacggttcactcgcttccaccagcgccatcgacctgggggcgacagtaattaaagccgccattgaacgtgcaaaaatcgattcacaacacgttgatgaagtgattatgggtaacgtgttacaagccgggctggggcaaaatccggcgcgtcaggcactgttaaaaagcgggctggcagaaacggtgtgcggattcacggtcaataaagtatgtggttcgggtcttaaaagtgtggcgcttgccgcccaggccattcaggcaggtcaggcgcagagcattgtggcggggggtatggaaaatatgagtttagccccctacttactcgatgcaaaagcacgctctggttatcgtcttggagacggacaggtttatgacgtaatcctgcgcgatggcctgatgtgcgccacccatggttatcatatggggattaccgccgaaaacgtggctaaagagtacggaattacccgtgaaatgcaggatgaactggcgctacattcacagcgtaaagcggcagccgcaattgagtccggtgcttttacagccgaaatcgtcccggtaaatgttgtcactcgaaagaaaaccttcgtcttcagtcaagacgaattcccgaaagcgaattcaacggctgaagcgttaggtgcattgcgcccggccttcgataaagcaggaacagtcaccgctgggaacgcgtctggtattaacgacggtgctgccgctctggtgattatggaagaatctgcggcgctggcagcaggccttacccccctggctcgcattaaaagttatgccagcggtggcgtgccccccgcattgatgggtatggggccagtacctgccacgcaaaaagcgttacaactggcggggctgcaactggcggatattgatctcattgaggctaatgaagcatttgctgcacagttccttgccgttgggaaaaacctgggctttgattctgagaaagtgaatgtcaacggcggggccatcgcgctcgggcatcctatcggtgccagtggtgctcgtattctggtcacactattacatgccatgcaggcacgcgataaaacgctggggctggcaacactgtgcattggcggcggtcagggaattgcgatggtgattgaacggttgaattaa

SEQ ID NO: 37 - protein, 394 aa, Escherichia coli
MKNCVIVSAVRTAIGSFNGSLASTSAIDLGATVIKAAIERAKIDSQHVDEVIMGNVLQAGLGQNPARQALLKSGLAETVCGFTVNKVCGSGLKSVALAAQAIQAGQAQSIVAGGMENMSLAPYLLDAKARSGYRLGDGQVYDVILRDGLMCATHGYHMGITAENVAKEYGITREMQDELALHSQRKAAAAIESGAFTAEIVPVNVVTRKKTFVFSQDEFPKANSTAEALGALRPAFDKAGTVTAGNASGINDGAAALVIMEESAALAAGLTPLARIKSYASGGVPPALMGMGPVPATQKALQLAGLQLADIDLIEANEAFAAQFLAVGKNLGFDSEKVNVNGGAIALGHPIGASGARILVTLLHAMQARDKTLGLATLCIGGGQGIAMVIERLN

SEQ ID NO: 38 - DNA, 1197 bp, Saccharomyces cerevisiae
atgtctcagaacgtttacattgtatcgactgccagaaccccaattggttcattccagggttctctatcctccaagacagcagtggaattgggtgctgttgctttaaaaggcgccttggctaaggttccagaattggatgcatccaaggattttgacgaaattatttttggtaacgttctttctgccaatttgggccaagctccggccagacaagttgctttggctgccggtttgagtaatcatatcgttgcaagcacagttaacaaggtctgtgcatccgctatgaaggcaatcattttgggtgctcaatccatcaaatgtggtaatgctgatgttgtcgtagctggtggttgtgaatctatgactaacgcaccatactacatgccagcagcccgtgcgggtgccaaatttggccaaactgttcttgttgatggtgtcgaaagagatgggttgaacgatgcgtacgatggtctagccatgggtgtacacgcagaaaagtgtgcccgtgattgggatattactagagaacaacaagacaattttgccatcgaatcctaccaaaaatctcaaaaatctcaaaaggaaggtaaattcgacaatgaaattgtacctgttaccattaagggatttagaggtaagcctgatactcaagtcacgaaggacgaggaacctgctagattacacgttgaaaaattgagatctgcaaggactgttttccaaaaagaaaacggtactgttactgccgctaacgcttctccaatcaacgatggtgctgcagccgtcatcttggtttccgaaaaagttttgaaggaaaagaatttgaagcctttggctattatcaaaggttggggtgaggccgctcatcaaccagctgattttacatgggctccatctcttgcagttccaaaggctttgaaacatgctggcatcgaagacatcaattctgttgattactttgaattcaatgaagccttttcggttgtcggtttggtgaacactaagattttgaagctagacccatctaaggttaatgtatatggtggtgctgttgctctaggtcacccattgggttgttctggtgctagagtggttgttacactgctatccatcttacagcaagaaggaggtaagatcggtgttgccgccatttgtaatggtggtggtggtgcttcctctattgtcattgaaaagatatga

SEQ ID NO: 39 - DNA, 1197 bp, Artificial Sequence; identical to SEQ ID NO: 38
  Codon Optimized Sacharomyces cerevisiae Sequence

SEQ ID NO: 40 - protein, 398 aa, Saccharomyces cerevisiae
MSQNVYIVSTARTPIGSFQGSLSSKTAVELGAVALKGALAKVPELDASKDFDEIIFGNVLSANLGQAPARQVALAAGLSNHIVASTVNKVCASAMKAIILGAQSIKCGNADVVVAGGCESMTNAPYYMPAARAGAKFGQTVLVDGVERDGLNDAYDGLAMGVHAEKCARDWDITREQQDNFAIESYQKSQKSQKEGKFDNEIVPVTIKGFRGKPDTQVTKDEEPARLHVEKLRSARTVFQKENGTVTAANASPINDGAAAVILVSEKVLKEKNLKPLAIIKGWGEAAHQPADFTWAPSLAVPKALKHAGIEDINSVDYFEFNEAFSVVGLVNTKILKLDPSKVNVYGGAVALGHPLGCSGARVVVTLLSILQQEGGKIGVAAICNGGGGASSIVIEKI

SEQ ID NO: 41 - DNA, 651 bp, Escherichia coli
atggatgcgaaacaacgtattgcgcgccgtgtggcgcaagagcttcgtgatggtgacatcgttaacttagggatcggtttacccacaatggtcgccaattatttaccggagggtattcatatcactctgcaatcggaaaacggcttcctcggtttaggcccggtcacgacagcgcatccagatctggtgaacgctggcgggcaaccgtgcggtgttttacccggtgcagccatgtttgatagcgccatgtcatttgcgctaatccgtggcggtcatattgatgcctgcgtgctcggcggtttgcaagtagacgaagaagcaaacctcgcgaactgggtagtgcctgggaaaatggtgcccggtatgggtggcgcgatggatctggtgaccgggtcgcgcaaagtgatcatcgccatggaacattgcgccaaagatggttcagcaaaaattttgcgccgctgcaccatgccactcactgcgcaacatgcggtgcatatgctggttactgaactggctgtctttcgttttattgacggcaaaatgtggctcaccgaaattgccgacgggtgtgatttagccaccgtgcgtgccaaaacagaagctcggtttgaagtcgccgccgatctgaatacgcaacggggtgatttatga

SEQ ID NO: 42 - DNA, 651 bp, Artificial Sequence; identical to SEQ ID NO: 41
  Codon Optimized E. coli Sequence

SEQ ID NO: 43 - protein, 216 aa, Escherichia coli
MDAKQRIARRVAQELRDGDIVNLGIGLPTMVANYLPEGIHITLQSENGFLGLGPVTTAHPDLVNAGGQPCGVLPGAAMFDSAMSFALIRGGHIDACVLGGLQVDEEANLANWVVPGKMVPGMGGAMDLVTGSRKVIIAMEHCAKDGSAKILRRCTMPLTAQHAVHMLVTELAVFRFIDGKMWLTEIADGCDLATVRAKTEARFEVAADLNTQRGDL

SEQ ID NO: 44 - DNA, 663 bp, Escherichia coli
atgaaaacaaaattgatgacattacaagacgccaccggcttctttcgtgacggcatgaccatcatggtgggcggatttatggggattggcactccatcccgcctggttgaagcattactggaatctggtgttcgcgacctgacattgatagccaatgataccgcgtttgttgataccggcatcggtccgctcatcgtcaatggtcgagtccgcaaagtgattgcttcacatatcggcaccaacccggaaacaggtcggcgcatgatatctggtgagatggacgtcgttctggtgccgcaaggtacgctaatcgagcaaattcgctgtggtggagctggacttggtggttttctcaccccaacgggtgtcggcaccgtcgtagaggaaggcaaacagacactgacactcgacggtaaaacctggctgctcgaacgcccactgcgcgccgacctggcgctaattcgcgctcatcgttgcgacacacttggcaacctgacctatcaacttagcgcccgcaactttaaccccctgatagcccttgcggctgatatcacgctggtagagccagatgaactggtcgaaaccggcgagctgcaacctgaccatattgtcacccctggtgccgttatcgaccacatcatcgtttcacaggagagcaaataa

SEQ ID NO: 45 - DNA, 663 bp, Artificial Sequence; identical to SEQ ID NO: 44
  Codon Optimized E. coli Sequence

SEQ ID NO: 46 - protein, 220 aa, Escherichia coli
MKTKLMTLQDATGFFRDGMTIMVGGFMGIGTPSRLVEALLESGVRDLTLIANDTAFVDTGIGPLIVNGRVRKVIASHIGTNPETGRRMISGEMDVVLVPQGTLIEQIRCGGAGLGGFLTPTGVGTVVEEGKQTLTLDGKTWLLERPLRADLALIRAHRCDTLGNLTYQLSARNFNPLIALAADITLVEPDELVETGELQPDHIVTPGAVIDHIIVSQESK

SEQ ID NO: 47 - DNA, 735 bp, Clostridium acetobutylicum
atgttaaaggatgaagtaattaaacaaattagcacgccattaacttcgcctgcatttcctagaggaccctataaatttcataatcgtgagtattttaacattgtatatcgtacagatatggatgcacttcgtaaagttgtgccagagcctttagaaattgatgagcccttagtcaggtttgaaattatggcaatgcatgatacgagtggacttggttgttatacagaaagcggacaggctattcccgtaagctttaatggagttaagggagattatcttcatatgatgtatttagataatgagcctgcaattgcagtaggaagggaattaagtgcatatcctaaaaagctcgggtatccaaagctttttgtggattcagatactttagtaggaactttagactatggaaaacttagagttgcgacagctacaatggggtacaaacataaagccttagatgctaatgaagcaaaggatcaaatttgtcgccctaattatatgttgaaaataatacccaattatgatggaagccctagaatatgtgagcttataaatgcgaaaatcacagatgttaccgtacatgaagcttggacaggaccaactcgactgcagttatttgatcacgctatggcgccacttaatgatttgccagtaaaagagattgtttctagctctcacattcttgcagatataatattgcctagagctgaagttatatatgattatcttaagtaa

SEQ ID NO: 48 - DNA, 735 bp, Artificial Sequence
  Codon Optimized Clostridium acetobutylicum Sequence
atgctgaaggacgaggttattaagcagattagcaccccgctgaccagcccggcgttcccgcgtggtccgtacaagttccataatcgcgaatacttcaacattgtgtatcgtaccgacatggatgcgctgcgtaaggtggttccggagccgctggaaattgacgagccgctggttcgtttcgaaatcatggcgatgcacgataccagcggtctgggctgctacaccgagagcggtcaggcgattccggtgagctttaacggtgttaaaggcgactacctgcacatgatgtatctggataacgaaccggcgattgcggtgggtcgtgagctgagcgcgtacccgaagaaactgggctatccgaagctgttcgtggacagcgataccctggtgggcaccctggactacggcaaactgcgtgttgcgaccgcgaccatgggctataagcacaaagcgctggacgcgaacgaagcgaaggatcagatttgccgtccgaactacatgctgaaaatcattccgaactatgacggtagcccgcgtatctgcgaactgattaacgcgaagatcaccgatgttaccgttcatgaggcgtggaccggcccgacccgtctgcaactgtttgaccacgcgatggcgccgctgaacgatctgccggtgaaagagatcgttagcagcagccacatcctggcggacatcatcctgccgcgtgcggaagttatctacgattacctgaagtaa

SEQ ID NO: 49 - protein, 244 aa, Clostridium acetobutylicum
MLKDEVIKQISTPLTSPAFPRGPYKFHNREYFNIVYRTDMDALRKVVPEPLEIDEPLVRFEIMAMHDTSGLGCYTESGQAIPVSFNGVKGDYLHMMYLDNEPAIAVGRELSAYPKKLGYPKLFVDSDTLVGTLDYGKLRVATATMGYKHKALDANEAKDQICRPNYMLKIIPNYDGSPRICELINAKITDVTVHEAWTGPTRLQLFDHAMAPLNDLPVKEIVSSSHILADIILPRAEVIYDYLK

SEQ ID NO: 50 - DNA, 741 bp, Clostridium beijerinckii
atgttagaaagtgaagtatctaaacaaattacaactccacttgctgctccagcgtttcctagaggaccatataggtttcacaatagagaatatctaaacattatttatcgaactgatttagatgctcttcgaaaaatagtaccagagccacttgaattagatagagcatatgttagatttgaaatgatggctatgcctgatacaaccggactaggctcatatacagaatgtggtcaagctattccagtaaaatataatggtgttaagggtgactacttgcatatgatgtatctagataatgaacctgctattgctgttggaagagaaagtagcgcttatccaaaaaagcttggctatccaaagctatttgttgattcagatactttagttgggacacttaaatatggtacattaccagtagctactgcaacaatgggatataagcacgagcctctagatcttaaagaagcctatgctcaaattgcaagacccaattttatgctaaaaatcattcaaggttacgatggtaagccaagaatttgtgaactaatatgtgcagaaaatactgatataactattcacggtgcttggactggaagtgcacgtctacaattatttagccatgcactagctcctcttgctgatttacctgtattagagattgtatcagcatctcatatcctcacagatttaactcttggaacacctaaggttgtacatgattatctttcagtaaaataa

SEQ ID NO: 51 - DNA, 741 bp, Artificial Sequence
  Codon Optimized Clostridium beijerinckii Sequence
atgctggagagcgaagttagcaaacaaatcaccaccccgctggcggcgccggcgttcccgcgtggcccgtaccgttttcataaccgtgagtacctgaacatcatttatcgtaccgacctggatgcgctgcgtaagattgtgccggagccgctggaactggaccgtgcgtacgttcgtttcgagatgatggcgatgccggataccaccggtctgggcagctacaccgaatgcggtcaggcgatcccggtgaagtataacggtgttaaaggcgactacctgcacatgatgtatctggataacgagccggcgattgcggtgggtcgtgaaagcagcgcgtacccgaagaaactgggctatccgaagctgtttgtggacagcgataccctggtgggcaccctgaaatatggcaccctgccggttgcgaccgcgaccatgggctacaagcacgagccgctggacctgaaagaagcgtatgcgcagattgcgcgtccgaacttcatgctgaagatcattcaaggttatgacggcaaaccgcgtatctgcgagctgatttgcgcggaaaacaccgatatcaccatccatggtgcgtggaccggcagcgcgcgtctgcaactgtttagccatgcgctggcgccgctggcggatctgccggtgctggaaatcgttagcgcgagccacattctgaccgatctgaccctgggcaccccgaaggttgtgcatgactatctgagcgtgaagtaa

SEQ ID NO: 52 - protein, 246 aa, Clostridium beijerinckii
MLESEVSKQITTPLAAPAFPRGPYRFHNREYLNIIYRTDLDALRKIVPEPLELDRAYVRFEMMAMPDTTGLGSYTECGQAIPVKYNGVKGDYLHMMYLDNEPAIAVGRESSAYPKKLGYPKLFVDSDTLVGTLKYGTLPVATATMGYKHEPLDLKEAYAQIARPNFMLKIIQGYDGKPRICELICAENTDITIHGAWTGSARLQLFSHALAPLADLPVLEIVSASHILTDLTLGTPKVVHDYLSVK

SEQ ID NO: 53 - DNA, 770 bp, Homo sapiens
atggaagagaagcagatcctgtgcgtggggctagtggtgctggacgtcatcagcctggtggacaagtaccctaaggaggactcggagataaggtgtttgtcccagagatggcagcgcggaggcaacgcgtccaactcctgcaccgttctctccctgctcggagccccctgtgccttcatgggctcaatggctcctggccatgttgctgattttgtcctggatgacctccgccgctattctgtggacctacgctacacagtctttcagaccacaggctccgtccccatcgccacggtcatcatcaacgaggccagtggtagccgcaccatcctatactatgacaggagcctgccagatgtgtctgctacagactttgagaaggttgatctgacccagttcaagtggatccacattgagggccggaacgcatcggagcaggtgaagatgctgcagcggatagacgcacacaacaccaggcagcctccagagcagaagatccgggtgtccgtggaggtggagaagccacgagaggagctcttccagctgtttggctacggagacgtggtgtttgtcagcaaagatgtggccaagcacttggggttccagtcagcagaggaagccttgaggggcttgtatggtcgtgtgaggaaaggggctgtgcttgtctgtgcctgggctgaggagggcgccgacgccctgggccctgatggcaaattgctccactcggatgctttcccgccaccccgcgtggtggatacactgggagctgg

SEQ ID NO: 54 - DNA, 897 bp, Artificial Sequence
  Codon Optimized Homo sapiens Sequence
atggaggaaaagcaaattctgtgcgttggtctggtggttctggacgtgattagcctggttgataagtacccgaaagaggatagcgaaatccgttgcctgagccagcgttggcaacgtggtggcaacgcgagcaatagctgcaccgttctgagcctgctgggtgcgccgtgcgcgttcatgggtagcatggcgccgggtcatgttgcggacttcctggtggcggattttcgtcgtcgtggtgtggacgttagccaggttgcgtggcaaagcaagggcgataccccgagctcctgctgcatcattaacaacagcaacggtaaccgtaccattgtgctgcacgacaccagcctgccggatgttagcgcgaccgacttcgagaaggtggatctgacccagtttaaatggattcacattgagggccgtaacgcgagcgaacaggttaaaatgctgcaacgtattgatgcgcacaacacccgtcagccgccggaacaaaagattcgtgtgagcgttgaggtggaaaaaccgcgtgaggaactgttccaactgtttggttacggcgacgtggttttcgttagcaaggatgtggcgaaacacctgggttttcaaagcgcggaggaagcgctgcgtggtctgtatggccgtgtgcgtaaaggcgcggttctggtgtgcgcgtgggcggaggaaggcgcggatgcgctgggtccggatggcaaactgctgcacagcgatgcgttcccgccgccgcgtgtggttgacaccctgggtgcgggcgataccttcaacgcgagcgttatctttagcctgagccagggccgtagcgtgcaagaggcgctgcgtttcggctgccaagttgcgggtaaaaaatgcggtctgcaaggctttgacggtatcgtgtaa

SEQ ID NO: 55 - protein, 298 aa, Homo sapiens
MEEKQILCVGLVVLDVISLVDKYPKEDSEIRCLSQRWQRGGNASNSCTVLSLLGAPCAFMGSMAPGHVADFLVADFRRRGVDVSQVAWQSKGDTPSSCCIINNSNGNRTIVLHDTSLPDVSATDFEKVDLTQFKWIHIEGRNASEQVKMLQRIDAHNTRQPPEQKIRVSVEVEKPREELFQLFGYGDVVFVSKDVAKHLGFQSAEEALRGLYGRVRKGAVLVCAWAEEGADALGPDGKLLHSDAFPPPRVVDTLGAGDTFNASVIFSLSQGRSVQEALRFGCQVAGKKCGLQGFDGIV

SEQ ID NO: 56 - DNA, 1095 bp, Homo sapiens
atggcccaccgatttccagccctcacccaggagcagaagaaggagctctcagaaattgcccagagcattgttgccaatggaaaggggatcctggctgcagatgaatctgtaggtaccatggggaaccgcctgcagaggatcaaggtggaaaacactgaagagaaccgccggcagttccgagaaatcctcttctctgtggacagttccatcaaccagagcatcgggggtgtgatccttttccacgagaccctctaccagaaggacagccagggaaagctgttcagaaacatcctcaaggaaaaggggatcgtggtgggaatcaagttagaccaaggaggtgctcctcttgcaggaacaaacaaagaaaccaccattcaagggcttgatggcctctcagagcgctgtgctcagtacaagaaagatggtgttgactttgggaagtggcgtgctgtgctgaggattgccgaccagtgtccatccagcctcgctatccaggaaaacgccaacgccctggctcgctacgccagcatctgtcagcagaatggactggtacctattgttgaaccagaggtaattcctgatggagaccatgacctggaacactgccagtatgttactgagaaggtcctggctgctgtctacaaggccctgaatgaccatcatgtttacctggagggcaccctgctaaagcccaacatggtgactgctggacatgcctgcaccaagaagtatactccagaacaagtagctatggccaccgtaacagctctccaccgtactgttcctgcagctgttcctggcatctgctttttgtctggtggcatgagtgaagaggatgccactctcaacctcaatgctatcaacctttgccctctaccaaagccctggaaactaagtttctcttatggacgggccctgcaggccagtgcactggctgcctggggtggcaaggctgcaaacaaggaggcaacccaggaggcttttatgaagcgggccatggctaactgccaggcggccaaaggacagtatgttcacacgggttcttctggggctgcttccacccagtcgctcttcacagcctgctatacctactag

SEQ ID NO: 57 - DNA, 1095 bp, Artificial Sequence
  Codon Optimized Homo sapiens Sequence
atggcgcaccgttttccggcgctgacccaagagcagaagaaggagctgagcgagattgcgcagagcatcgtggcgaatggtaaaggtattctggcggcggatgagagcgttggtaccatgggcaaccgtctgcagcgtattaaggtggagaacaccgaggaaaaccgtcgtcaattccgtgaaatcctgtttagcgttgatagcagcatcaaccagagcattggtggcgtgatcctgttccacgaaaccctgtaccagaaggacagccaaggtaaactgtttcgtaacattctgaaggaaaaaggtattgtggttggcatcaagctggatcaaggtggcgcgccgctggcgggcaccaacaaggaaaccaccatccagggtctggacggcctgagcgaacgttgcgcgcaatataagaaagatggtgttgacttcggcaagtggcgtgcggtgctgcgtattgcggaccagtgcccgagcagcctggcgatccaagaaaacgcgaacgcgctggcgcgttacgcgagcatctgccagcaaaacggtctggtgccgattgttgagccggaagttatcccggacggcgatcacgacctggagcactgccagtatgtgaccgaaaaggttctggcggcggtgtacaaagcgctgaacgatcaccacgtttatctggagggtaccctgctgaaaccgaacatggtgaccgcgggccatgcgtgcaccaagaaatacaccccggaacaggtggcgatggcgaccgtgaccgcgctgcaccgtaccgttccggcggcggtgccgggtatttgctttctgagcggtggcatgagcgaagaggacgcgaccctgaacctgaacgcgatcaacctgtgcccgctgccgaagccgtggaaactgagcttcagctacggccgtgcgctgcaggcgagcgcgctggcggcgtggggtggcaaggcggcgaacaaagaggcgacccaagaagcgtttatgaagcgtgcgatggcgaactgccaggcggcgaaaggtcaatatgtgcataccggcagcagcggtgcggcgagcacccagagcctgtttaccgcgtgctatacctattaa

SEQ ID NO: 58 - protein, 364 aa, Homo sapiens
MAHRFPALTQEQKKELSEIAQSIVANGKGILAADESVGTMGNRLQRIKVENTEENRRQFREILFSVDSSINQSIGGVILFHETLYQKDSQGKLFRNILKEKGIVVGIKLDQGGAPLAGTNKETTIQGLDGLSERCAQYKKDGVDFGKWRAVLRIADQCPSSLAIQENANALARYASICQQNGLVPIVEPEVIPDGDHDLEHCQYVTEKVLAAVYKALNDHHVYLEGTLLKPNMVTAGHACTKKYTPEQVAMATVTALHRTVPAAVPGICFLSGGMSEEDATLNLNAINLCPLPKPWKLSFSYGRALQASALAAWGGKAANKEATQEAFMKRAMANCQAAKGQYVHTGSSGAASTQSLFTACYTY

SEQ ID NO: 59 - DNA, 747 bp, Caulobacter crescentus
atgtcctcagccatctatcccagcctgaagggcaagcgcgtcgtcatcaccggcggcggctcgggcatcggggccggcctcaccgccggcttcgcccgtcagggcgcggaggtgatcttcctcgacatcgccgacgaggactccagggctcttgaggccgagctggccggctcgccgatcccgccggtctacaagcgctgcgacctgatgaacctcgaggcgatcaaggcggtcttcgccgagatcggcgacgtcgacgtgctggtcaacaacgccggcaatgacgaccgccacaagctggccgacgtgaccggcgcctattgggacgagcggatcaacgtcaacctgcgccacatgctgttctgcacccaggccgtcgcgccgggcatgaagaagcgtggcggcggggcggtgatcaacttcggttcgatcagctggcacctggggcttgaggacctcgtcctctacgaaaccgccaaggccggcatcgaaggcatgacccgcgcgctggcccgggagctgggtcccgacgacatccgcgtcacctgcgtggtgccgggcaacgtcaagaccaagcgccaggagaagtggtacacgcccgaaggcgaggcccagatcgtggcggcccaatgcctgaagggccgcatcgtcccggagaacgtcgccgcgctggtgctgttcctggcctcggatgacgcgtcgctctgcaccggccacgaatactggatcgacgccggctggcgttga

SEQ ID NO: 60 - DNA, 747 bp, Artificial Sequence
  Codon Optimized Caulobacter crescentus Sequence
atgagcagcgcgatctacccgagcctgaaaggtaaacgtgtggtgattaccggcggcggcagcggcattggtgcgggcctgaccgcgggcttcgcgcgtcagggtgcggaagtgatctttctggacattgcggacgaagatagccgtgcgctggaggcggaactggcgggcagcccgatcccgccggtgtacaagcgttgcgatctgatgaacctggaggcgatcaaagcggttttcgcggaaattggcgacgtggatgttctggtgaacaacgcgggtaacgacgaccgtcacaagctggcggatgtgaccggtgcgtattgggatgagcgtattaacgttaacctgcgtcacatgctgttctgcacccaggcggtggcgccgggtatgaagaaacgtggtggcggtgcggttatcaactttggcagcattagctggcacctgggtctggaggacctggtgctgtacgaaaccgcgaaagcgggcatcgagggtatgacccgtgcgctggcgcgtgaactgggtccggacgatattcgtgtgacctgcgtggttccgggtaacgttaagaccaaacgtcaagagaagtggtataccccggagggtgaagcgcagattgttgcggcgcaatgcctgaaaggtcgtattgttccggaaaacgtggcggcgctggttctgtttctggcgagcgatgatgcgagcctgtgcaccggccatgagtattggattgatgcgggctggcgttaa

SEQ ID NO: 61 - protein, 248 aa, Caulobacter crescentus
MSSAIYPSLKGKRVVITGGGSGIGAGLTAGFARQGAEVIFLDIADEDSRALEAELAGSPIPPVYKRCDLMNLEAIKAVFAEIGDVDVLVNNAGNDDRHKLADVTGAYWDERINVNLRHMLFCTQAVAPGMKKRGGGAVINFGSISWHLGLEDLVLYETAKAGIEGMTRALARELGPDDIRVTCVVPGNVKTKRQEKWYTPEGEAQIVAAQCLKGRIVPENVAALVLFLASDDASLCTGHEYWIDAGWR

SEQ ID NO: 62 - DNA, 1173 bp, Haloferax volcanii
atgagccccgcccccaccgacatcgtcgaggagttcacgcgccgcgactggcagggagacgacgtgacgggcaccgtgcgggtcgccatgatcggcctcggctggtggacccgcgacgaggcgattcccgcggtcgaggcgtccgagttctgcgagacgacggtcgtcgtcagcagttcgaaggagaaagccgagggcgcgacggcgttgaccgagtcgataacccacggcctcacctacgacgagttccacgagggggtcgccgccgacgcctacgacgcggtgtacgtcgtcacgccgaacggtctgcatctcccgtacgtcgagaccgccgccgagttggggaaggcggtcctctgcgagaaaccgctggaagcgtcggtcgagcgggccgaaaagctcgtcgccgcctgcgaccgcgccgacgtgcccctgatggtcgcctatcggatgcagaccgagccggccgtccggcgcgcccgcgaactcgtcgaggccggcgtcatcggcgagccggtgttcgtccacggccacatgtcccagcgcctgctcgacgaggtcgtccccgaccccgaccagtggcggctcgaccccgaactctccggcggcgcgaccgtcatggacatcgggctctacccgctgaacaccgcccggttcgtcctcgacgccgaccccgtccgcgtcagggcgaccgcccgcgtcgacgacgaggcgttcgaggccgtcggcgacgagcacgtcagtttcggcgtcgacttcgacgacggcacgctcgcggtctgcaccgccagccagtcggcttaccagttgagccacctccgggtgaccggcaccgagggcgaactcgaaatcgagcccgcgttctacaaccgccaaaagcggggattccgactgtcgtggggggaccagtccgccgactacgacttcgagcaggtaaaccagatgacggaggagttcgactacttcgcgtcccggctcctgtcggattccgaccccgcgcccgacggcgaccacgcgctcgtggacatgcgcgcgatggacgcgatttacgccgcggcggagcgcgggaccgatgtcgccgtcgacgccgccgactccgattccgccgactccgattccgccgacgctgccgccgccaaccacgacgccgaccccgattccgacgggacgtag

SEQ ID NO: 63 - protein, 390 aa, Haloferax volcanii
MSPAPTDIVEEFTRRDWQGDDVTGTVRVAMIGLGWWTRDEAIPAVEASEFCETTVVVSSSKEKAEGATALTESITHGLTYDEFHEGVAADAYDAVYVVTPNGLHLPYVETAAELGKAVLCEKPLEASVERAEKLVAACDRADVPLMVAYRMQTEPAVRRARELVEAGVIGEPVFVHGHMSQRLLDEVVPDPDQWRLDPELSGGATVMDIGLYPLNTARFVLDADPVRVRATARVDDEAFEAVGDEHVSFGVDFDDGTLAVCTASQSAYQLSHLRVTGTEGELEIEPAFYNRQKRGFRLSWGDQSADYDFEQVNQMTEEFDYFASRLLSDSDPAPDGDHALVDMRAMDAIYAAAERGTDVAVDAADSDSADSDSADAAAANHDADPDSDGT

SEQ ID NO: 64 - DNA, 1176 bp, Unknown
  Trichoderma reesei Sequence
atggcgtctggaaacccttacaccctgaaatggggcatcatggccaccggcggaatcgcagagaccttctgcaaggatctcctgtgcaaccccgcgattcgaggcgccgatgatgtgcgccacgagattgtggccgtggcctcttccagcagcagcaagagagcagaggagttcctccagagaatcgacggtgcctttgacgccaagacgtacggatcatacccggaacttgtggcagaccccaacgtcgacatcgtctatgtggcaactccccacagccaccacttccagaacaccatgctggcgctggaagccggcaagaacgtcttgtgcgaaaaggctttcaccgtgacggccgcgcaggcccgaaagctggttgagacggccaaggccaagaagctcttcctgatggaagctgtgtggacacggtactttccgctgagtatcaagattcgagagctcattgccgccggcgagattggcactgtctttcgaacaatcgccgacttgtccatcaacgcaaactcagagcagggtcaagccctgaaattcgcagactcacatcgaatggtcaacccggacctcgcaggcggtgccaccttggatctcggagtctatcccttgacctgggtgttccagaccctgtatcatttgcaaccggaggaagacaaggaggctcccaccgtggttgcttccagcaacaagtacaccactggcgcagacgagaataccgccatcatctgcagcttccctcgccacaacagcattggaattgcttcgacgacgatgagggcggacaccgaccccgagaaggacaccattccggcggtccgaattcaaggatccaagggagaaatccaagtcttcttcccgacctaccgaccgctcaagtacaaggtggtgaagacgaacggcgaggcgcagacggttgactgccccatccccggagaccccgcgcgcaagggctcgggccacggaatgttctgggaggcggacgagtgtgctcgatgccttcgcgatggcaagttggagagtgccacgttgccatggaaggagagcattgtcattatggaaacgatggaggaggcgctgaggcagggtggcgtcacgtatccggagctgattaccacggatgtctatgatcccaagagccctctcaacacggggaatcagtag

SEQ ID NO: 65 - protein, 391 aa, Unknown
  Trichoderma reesei Sequence
MASGNPYTLKWGIMATGGIAETFCKDLLCNPAIRGADDVRHEIVAVASSSSSKRAEEFLQRIDGAFDAKTYGSYPELVADPNVDIVYVATPHSHHFQNTMLALEAGKNVLCEKAFTVTAAQARKLVETAKAKKLFLMEAVWTRYFPLSIKIRELIAAGEIGTVFRTIADLSINANSEQGQALKFADSHRMVNPDLAGGATLDLGVYPLTWVFQTLYHLQPEEDKEAPTVVASSNKYTTGADENTAIICSFPRHNSIGIASTTMRADTDPEKDTIPAVRIQGSKGEIQVFFPTYRPLKYKVVKTNGEAQTVDCPIPGDPARKGSGHGMFWEADECARCLRDGKLESATLPWKESIVIMETMEEALRQGGVTYPELITTDVYDPKSPLNTGNQ

SEQ ID NO: 66 - DNA, 870 bp, Caulobacter crescentus
atgaccgctcaagtcacttgcgtatgggatctgaaggccacgttgggcgaaggcccgatctggcatggcgacaccctgtggttcgtcgacatcaagcagcgtaaaatccacaactaccaccccgccaccggcgagcgcttcagcttcgacgcgccggatcaggtgaccttcctcgcgccgatcgtcggcgcgaccggctttgtcgtcggtctgaagaccgggattcaccgcttccacccggccacgggcttcagcctgctgctcgaggtcgaggacgcggcgctgaacaaccgccccaacgacgccacggtcgacgcgcaaggccgtctgtggttcggcaccatgcacgacggggaagagaacaatagcggctcgctctatcggatggacctcaccggcgtcgcccggatggaccgcgacatctgcatcaccaacggcccgtgcgtctcgcccgacggcaagaccttctaccacaccgacaccctggaaaagacgatctacgccttcgacctggccgaggacggcctgctgtcgaacaagcgcgtcttcgtgcagttcgccctgggcgacgatgtctatccggacggttcggtcgtcgattccgaaggctatctgtggaccgccctgtggggcggtttcggcgcggtccgcttctcgccgcaaggcgacgccgtgacgcgcatcgaactgcccgcccccaacgtcaccaagccctgcttcggcgggcctgacctgaagaccctctatttcaccaccgcccgcaagggcctgagcgacgagaccctggcccagtacccgctggccggcggtgtgttcgccgttccggtcgatgtggccggccaaccccagcatgaggtccgccttgtctaa

SEQ ID NO: 67 - protein, 289 aa, Caulobacter crescentus
MTAQVTCVWDLKATLGEGPIWHGDTLWFVDIKQRKIHNYHPATGERFSFDAPDQVTFLAPIVGATGFVVGLKTGIHRFHPATGFSLLLEVEDAALNNRPNDATVDAQGRLWFGTMHDGEENNSGSLYRMDLTGVARMDRDICITNGPCVSPDGKTFYHTDTLEKTIYAFDLAEDGLLSNKRVFVQFALGDDVYPDGSVVDSEGYLWTALWGGFGAVRFSPQGDAVTRIELPAPNVTKPCFGGPDLKTLYFTTARKGLSDETLAQYPLAGGVFAVPVDVAGQPQHEVRLV

SEQ ID NO: 68 - DNA, 1776 bp, Caulobacter crescentus
ttgtctaaccgcacgccccgccggttccggtcccgcgattggttcgataaccccgaccatatcgacatgaccgcgctctatctggagcgcttcatgaactacgggatcacgccggaggagctgcgcagcggcaagccgatcatcggcatcgcccagaccggcagcgacatctcgccctgcaaccgcatccacctggacctggtccagcgggtgcgggacgggatccgcgacgccgggggcatccccatggagttcccggtccatccgatcttcgagaactgccgtcgcccgacggcggcgctggaccggaacctctcgtacctgggtctcgtcgagaccctgcacggctatccgatcgacgccgtggttctgaccaccggctgcgacaagaccaccccggccgggatcatggccgccaccacggtcaatatcccggccatcgtgctgtcgggcggcccgatgctggacggctggcacgagaacgagctcgtgggctcgggcaccgtgatctggcgctcgcgccgcaagctggcggccggcgagatcaccgaggaagagttcatcgaccgcgccgccagctcggcgccgtcggcgggccactgcaacaccatgggcacggcctcgaccatgaacgccgtggccgaggcgctgggcctgtcgctgaccggctgcgcggccatccccgccccctaccgcgagcgcggccagatggcctacaagaccggccagcgcatcgtcgatctggcctatgacgacgtcaaaccgctcgacatcctgaccaagcaagccttcgagaacgccatcgccctggtggcggcggccggcggctcgaccaacgcccagccgcacatcgtggccatggcccgtcacgccggcgtcgagatcaccgccgacgactggcgcgcggcctatgacatcccgctgatcgtcaacatgcagccggccggcaagtatctgggcgagcgcttccaccgagccggcggcgcgccggcggtgctgtgggagctgttgcagcaaggccgcctgcacggcgacgtgctgaccgtcaccggcaagacgatgagcgagaacctgcaaggccgcgaaaccagcgaccgcgaggtgatcttcccgtaccacgagccgctggccgagaaggccgggttcctggttctcaagggcaacctcttcgacttcgcgatcatgaagtccagcgtgatcggcgaggagttccgcaagcgctacctgtcgcagcccggccaggaaggcgtgttcgaagcccgcgccatcgtgttcgacggctcggacgactatcacaagcggatcaacgatccggccctggagatcgacgagcgctgcatcctggtgatccgcggcgcgggtccgatcggctggcccggctcggccgaggtcgtcaacatgcagccgccggatcaccttctgaagaaggggatcatgagcctgcccaccctgggcgatggccgtcagtcgggcaccgccgacagcccctcgatcctgaacgcctcgcccgaaagcgcgatcggcggcggcctgtcgtggctgcgcaccggcgacaccatccgcatcgacctcaacaccggccgctgcgacgccctggtcgacgaggcgacgatcgccgcgcgcaagcaggacggcatcccggcggttcccgccaccatgacgccctggcaggaaatctaccgcgcccacgccagtcagctcgacaccggcggcgtgctggagttcgcggtcaagtaccaggacctggcggccaagctgccccgccacaaccactga

SEQ ID NO: 69 - protein, 591 aa, Caulobacter crescentus
MSNRTPRRFRSRDWFDNPDHIDMTALYLERFMNYGITPEELRSGKPIIGIAQTGSDISPCNRIHLDLVQRVRDGIRDAGGIPMEFPVHPIFENCRRPTAALDRNLSYLGLVETLHGYPIDAVVLTTGCDKTTPAGIMAATTVNIPAIVLSGGPMLDGWHENELVGSGTVIWRSRRKLAAGEITEEEFIDRAASSAPSAGHCNTMGTASTMNAVAEALGLSLTGCAAIPAPYRERGQMAYKTGQRIVDLAYDDVKPLDILTKQAFENAIALVAAAGGSTNAQPHIVAMARHAGVEITADDWRAAYDIPLIVNMQPAGKYLGERFHRAGGAPAVLWELLQQGRLHGDVLTVTGKTMSENLQGRETSDREVIFPYHEPLAEKAGFLVLKGNLFDFAIMKSSVIGEEFRKRYLSQPGQEGVFEARAIVFDGSDDYHKRINDPALEIDERCILVIRGAGPIGWPGSAEVVNMQPPDHLLKKGIMSLPTLGDGRQSGTADSPSILNASPESAIGGGLSWLRTGDTIRIDLNTGRCDALVDEATIAARKQDGIPAVPATMTPWQEIYRAHASQLDTGGVLEFAVKYQDLAAKLPRHNH

SEQ ID NO: 70 - DNA, 1968 bp, Escherichia coli
atgtctgttcgcaatatttttgctgacgagagccacgatatttacaccgtcagaacgcacgccgatggcccggacggcgaactcccattaaccgcagagatgcttatcaaccgcccgagcggggatctgttcggtatgaccatgaatgccggaatgggttggtctccggacgagctggatcgggacggtattttactgctcagtacactcggtggcttacgcggcgcagacggtaaacccgtggcgctggcgttgcaccaggggcattacgaactggacatccagatgaaagcggcggccgaggttattaaagccaaccatgccctgccctatgccgtgtacgtctccgatccttgtgacgggcgtactcagggtacaacggggatgtttgattcgctaccataccgaaatgacgcatcgatggtaatgcgccgccttattcgctctctgcccgacgcgaaagcagttattggtgtggcgagttgcgataaggggcttccggccaccatgatggcactcgccgcgcagcacaacatcgcaaccgtgctggtccccggcggcgcgacgctgcccgcaaaggatggagaagacaacggcaaggtgcaaaccattggcgcacgcttcgccaatggcgaattatctctacaggacgcacgccgtgcgggctgtaaagcctgtgcctcttccggcggcggctgtcaatttttgggcactgccgggacatctcaggtggtggccgaaggattgggactggcaatcccacattcagccctggccccttccggtgagcctgtgtggcgggagatcgccagagcttccgcgcgagctgcgctgaacctgagtcaaaaaggcatcaccacccgggaaattctcaccgataaagcgatagagaatgcgatgacggtccatgccgcgttcggtggttcaacaaacctgctgttacacatcccggcaattgctcaccaggcaggttgccatatcccgaccgttgatgactggatccgcatcaacaagcgcgtgccccgactggtgagcgtactgcctaatggcccggtttatcatccaacggtcaatgcctttatggcaggtggtgtgccggaagtcatgttgcatctgcgcagcctcggattgttgcatgaagacgttatgacggttaccggcagcacgctgaaagaaaacctcgactggtgggagcactccgaacggcgtcagcggttcaagcaactcctgctcgatcaggaacaaatcaacgctgacgaagtgatcatgtctccgcagcaagcaaaagcgcgcggattaacctcaactatcaccttcccggtgggcaatattgcgccagaaggttcggtgatcaaatccaccgccattgacccctcgatgattgatgagcaaggtatctattaccataaaggtgtggcgaaggtttatctgtccgagaaaagtgcgatttacgatatcaaacatgacaagatcaaggcgggcgatattctggtcattattggcgttggaccttcaggtacagggatggaagaaacctaccaggttaccagtgccctgaagcatctgtcatacggtaagcatgtttcgttaatcaccgatgcacgtttctcgggcgtttctactggcgcgtgcatcggccatgtggggccagaagcgctggccggaggccccatcggtaaattacgcaccggggatttaattgaaattaaaattgattgtcgcgagcttcacggcgaagtcaatttcctcggaacccgtagcgatgaacaattaccttcacaggaggaggcaactgcaatattaaatgccagacccagccatcaggatttacttcccgatcctgaattgccagatgatacccggctatgggcaatgcttcaggccgtgagtggtgggacatggaccggttgtatttatgatgtaaacaaaattggcgcggctttgcgcgattttatgaataaaaactga

SEQ ID NO: 71 - DNA, 1968 bp, Artificial Sequence; identical to SEQ ID NO: 70
  Codon Optimized E. coli Sequence

SEQ ID NO: 72 - protein, 655 aa, Escherichia coli [sequence omitted]

SEQ ID NO: 73 - DNA, 1968 bp, Escherichia coli
atgaccattgagaaaattttcaccccgcaggacgacgcgttttatgcggtgatcacccacgcggcggggccgcagggcgctctgccgctgaccccgcagatgctgatggaatctcccagcggcaacctgttcggcatgacgcagaacgccgggatgggctgggacgccaacaagctcaccggcaaagaggtgctgattatcggcactcagggcggcatccgcgccggagacggacgcccaatcgcgctgggctaccacaccgggcattgggagatcggcatgcagatgcaggcggcggcgaaggagatcacccgcaatggcgggatcccgttcgcggccttcgtcagcgatccgtgcgacgggcgctcgcagggcacgcacggtatgttcgattccctgccgtaccgcaacgacgcggcgatcgtgtttcgccgcctgatccgctccctgccgacgcggcgggcggtgatcggcgtagcgacctgcgataaagggctgcccgccaccatgattgcgctggccgcgatgcacgacctgccgactattctggtgccgggcggggcgacgctgccgccgaccgtcggggaagacgcgggcaaggtgcagaccatcggcgcgcgtttcgccaaccacgaactctccctgcaggaggccgccgaactgggctgtcgcgcctgcgcctcgccgggcggcgggtgtcagttcctcggcacggcgggcacctcgcaggtggtcgcggaggcgctgggtctggcgctgccgcactccgcgctggcgccgtccgggcaggcggtgtggctggagatcgcccgccagtcggcgcgcgcggtcagcgagctggatagccgcggcatcaccacgcgggatatcctctccgataaagccatcgaaaacgcgatggtgatccacgcggcgttcggcggctccaccaatttactgctgcacattccggccatcgcccacgcggcgggctgcacgatcccggacgttgagcactggacgcgcatcaaccgtaaagtgccgcgtctggtgagcgtgctgcccaacggcccggactatcacccgaccgtgcgcgccttcctcgcgggcggcgtgccggaggtgatgctccacctgcgcgacctcggcctgctgcatctggacgccatgaccgtgaccggccagacggtgggcgagaaccttgaatggtggcaggcgtccgagcgccgggcgcgcttccgccagtgcctgcgcgagcaggacggcgtagagccggatgacgtgatcctgccgccggagaaggcaaaagcgaaagggctgacctcgacggtctgcttcccgacgggcaacatcgctccggaaggttcggtgatcaaggccacggcgatcgacccgtcggtggtgggcgaagatggcgtataccaccacaccggccgggtgcgggtgtttgtctcggaagcgcaggcgatcaaggcgatcaagcgggaagagattgtgcagggcgatatcatggtggtgatcggcggcgggccgtccggcaccggcatggaagagacctaccagctcacctccgcgctaaagcatatctcgtggggcaagacggtgtcgctcatcaccgatgcgcgcttctcgggcgtgtcgacgggcgcctgcttcggccacgtgtcgccggaggcgctggcgggcgggccgattggcaagctgcgcgataacgacatcatcgagattgccgtggatcgtctgacgttaactggcagcgtgaacttcatcggcaccgcggacaacccgctgacgccggaagagggcgcgcgcgagctggcgcggcggcagacgcacccggacctgcacgcccacgactttttgccggacgacacccggctgtgggcggcactgcagtcggtgagcggcggcacctggaaaggctgtatttatgacaccgataaaattatcgaggtaattaacgccggtaaaaaagcgctcggaatttaa

SEQ ID NO: 74 - DNA, 1968 bp, Artificial Sequence; identical to SEQ ID NO: 73
  Codon Optimized E. coli Sequence

SEQ ID NO: 75 - protein, 655 aa, Escherichia coli
MTIEKIFTPQDDAFYAVITHAAGPQGALPLTPQMLMESPSGNLFGMTQNAGMGWDANKLTGKEVLIIGTQGGIRAGDGRPIALGYHTGHWEIGMQMQAAAKEITRNGGIPFAAFVSDPCDGRSQGTHGMFDSLPYRNDAAIVFRRLIRSLPTRRAVIGVATCDKGLPATMIALAAMHDLPTILVPGGATLPPTVGEDAGKVQTIGARFANHELSLQEAAELGCRACASPGGGCQFLGTAGTSQVVAEALGLALPHSALAPSGQAVWLEIARQSARAVSELDSRGITTRDILSDKAIENAMVIHAAFGGSTNLLLHIPAIAHAAGCTIPDVEHWTRINRKVPRLVSVLPNGPDYHPTVRAFLAGGVPEVMLHLRDLGLLHLDAMTVTGQTVGENLEWWQASERRARFRQCLREQDGVEPDDVILPPEKAKAKGLTSTVCFPTGNIAPEGSVIKATAIDPSVVGEDGVYHHTGRVRVFVSEAQAIKAIKREEIVQGDIMVVIGGGPSGTGMEETYQLTSALKHISWGKTVSLITDARFSGVSTGACFGHVSPEALAGGPIGKLRDNDIIEIAVDRLTLTGSVNFIGTADNPLTPEEGARELARRQTHPDLHAHDFLPDDTRLWAALQSVSGGTWKGCIYDTDKIIEVINAGKKALGI

SEQ ID NO: 76 - DNA, 906 bp, Escherichia coli
atgaaaaaattcagcggcattattccaccggtatccagcacgtttcatcgtgacggaacccttgataaaaaggcaatgcgcgaagttgccgacttcctgattaataaaggggtcgacgggctgttttatctgggtaccggtggtgaatttagccaaatgaatacagcccagcgcatggcactcgccgaagaagctgtaaccattgtcgacgggcgagtgccggtattgattggcgtcggttccccttccactgacgaagcggtcaaactggcgcagcatgcgcaagcctacggcgctgatggtatcgtcgccatcaacccctactactggaaagtcgcaccacgaaatcttgacgactattaccagcagatcgcccgtagcgtcaccctaccggtgatcctgtacaactttccggatctgacgggtcaggacttaaccccggaaaccgtgacgcgtctggctctgcaaaacgagaatatcgttggcatcaaagacaccatcgacagcgttggtcacttgcgtacgatgatcaacacagttaagtcggtacgcccgtcgttttcggtattctgcggttacgatgatcatttgctgaatacgatgctgctgggcggcgacggtgcgataaccgccagcgctaactttgctccggaactctccgtcggcatctaccgcgcctggcgtgaaggcgatctggcgaccgctgcgacgctgaataaaaaactactacaactgcccgctatttacgccctcgaaacaccgtttgtctcactgatcaaatacagcatgcagtgtgtcgggctgcctgtagagacatattgcttaccaccgattcttgaagcatctgaagaagcaaaagataaagtccacgtgctgcttaccgcgcagggcattttaccagtctga

SEQ ID NO: 77 - DNA, 906 bp, Artificial Sequence; identical to SEQ ID NO: 76
  Codon Optimized E. coli Sequence

SEQ ID NO: 78 - protein, 301 aa, Escherichia coli
MKKFSGIIPPVSSTFHRDGTLDKKAMREVADFLINKGVDGLFYLGTGGEFSQMNTAQRMALAEEAVTIVDGRVPVLIGVGSPSTDEAVKLAQHAQAYGADGIVAINPYYWKVAPRNLDDYYQQIARSVTLPVILYNFPDLTGQDLTPETVTRLALQNENIVGIKDTIDSVGHLRTMINTVKSVRPSFSVFCGYDDHLLNTMLLGGDGAITASANFAPELSVGIYRAWREGDLATAATLNKKLLQLPAIYALETPFVSLIKYSMQCVGLPVETYCLPPILEASEEAKDKVHVLLTAQGILPV

SEQ ID NO: 79 - DNA, 909 bp, Escherichia coli
atgccgcagtccgcgttgttcacgggaatcattccccctgtctccaccatttttaccgccgacggccagctcgataagccgggcaccgccgcgctgatcgacgatctgatcaaagcaggcgttgacggcctgttcttcctgggcagcggtggcgagttctcccagctcggcgccgaagagcgtaaagccattgcccgctttgctatcgatcatgtcgatcgtcgcgtgccggtgctgatcggcaccggcggcaccaacgcccgggaaaccatcgaactcagccagcacgcgcagcaggcgggcgcggacggcatcgtggtgatcaacccctactactggaaagtgtcggaagcgaacctgatccgctatttcgagcaggtggccgacagcgtcacgctgccggtgatgctctataacttcccggcgctgaccgggcaggatctgactccggcgctggtgaaaaccctcgccgactcgcgcagcaatattatcggcatcaaagacaccatcgactccgtcgcccacctgcgcagcatgatccataccgtcaaaggtgcccatccgcacttcaccgtgctctgcggctacgacgatcatctgttcaataccctgctgctcggcggcgacggggcgatatcggcgagcggcaactttgccccgcaggtgtcggtgaatcttctgaaagcctggcgcgacggggacgtggcgaaagcggccgggtatcatcagaccttgctgcaaattccgcagatgtatcagctggatacgccgtttgtgaacgtgattaaagaggcgatcgtgctctgcggtcgtcctgtctccacgcacgtgctgccgcccgcctcgccgctggacgagccgcgcaaggcgcagctgaaaaccctgctgcaacagctcaagctttgctga

SEQ ID NO: 80 - DNA, 909 bp, Artificial Sequence; identical to SEQ ID NO: 79
  Codon Optimized E. coli Sequence

SEQ ID NO: 81 - protein, 302 aa, Escherichia coli
MPQSALFTGIIPPVSTIFTADGQLDKPGTAALIDDLIKAGVDGLFFLGSGGEFSQLGAEERKAIARFAIDHVDRRVPVLIGTGGTNARETIELSQHAQQAGADGIVVINPYYWKVSEANLIRYFEQVADSVTLPVMLYNFPALTGQDLTPALVKTLADSRSNIIGIKDTIDSVAHLRSMIHTVKGAHPHFTVLCGYDDHLFNTLLLGGDGAISASGNFAPQVSVNLLKAWRDGDVAKAAGYHQTLLQIPQMYQLDTPFVNVIKEAIVLCGRPVSTHVLPPASPLDEPRKAQLKTLLQQLKLC

SEQ ID NO: 82 - DNA, 957 bp, Unknown
  Scheffersomyces stipitis Sequence
atgccttctattaagttgaactctggttacgacatgccagccgtcggtttcggctgttggaaagtcgacgtcgacacctgttctgaacagatctaccgtgctatcaagaccggttacagattgttcgacggtgccgaagattacgccaacgaaaagttagttggtgccggtgtcaagaaggccattgacgaaggtatcgtcaagcgtgaagatttgttccttacctccaagttgtggaacaactaccaccacccagacaacgtcgaaaaggccttgaacagaaccctttctgacttgcaagttgactacgttgacttgttcttgatccacttcccagtcaccttcaagttcgttccattagaagaaaagtacccaccaggattctactgtggtaagggtgacaacttcgactacgaagatgttccaattttagagacttggaaggctcttgaaaagttggtcaaggccggtaagatcagatctatcggtgtttctaacttcccaggtgctttgctcttggacttgttgagaggtgctaccatcaagccatctgtcttgcaagttgaacaccacccatacttgcaacaaccaagattgatcgaattcgctcaatcccgtggtattgctgtcaccgcttactcttcgttcggtcctcaatctttcgttgaattgaaccaaggtagagctttgaacacttctccattgttcgagaacgaaactatcaaggctatcgctgctaagcacggtaagtctccagctcaagtcttgttgagatggtcatcccaaagaggcattgccatcattccaaagtccaacactgtcccaagattgttggaaaacaaggacgtcaacagcttcgacttggacgaacaagatttcgctgacattgccaagttggacatcaacttgagattcaacgacccatgggactgggacaagattcctatcttcgtctaa

SEQ ID NO: 83 - DNA, 957 bp, Artificial Sequence
  Codon Optimized Scheffersomyces stipitis Sequence
atgccatctatcaagttaaattccggttacgacatgcctgctgttggtttcggttgctggaaggttgatgtcgatacttgttccgagcaaatttaccgtgctatcaagactggttacagattgttcgatggtgctgaagactacgccaacgaaaagttagtcggtgctggtgttaaaaaggctatcgacgaaggtattgttaaaagagaagacttgttcttgacttctaagttgtggaacaactaccaccatcctgataacgtcgaaaaagctttgaaccgtaccttgtccgatttgcaagtcgattacgttgatttgttcttgattcatttcccagttaccttcaagttcgttccattggaagagaagtatccaccaggtttctactgtggtaagggtgataacttcgattacgaagatgtcccaatcttagaaacctggaaggctttagaaaagttggttaaggctggtaagatcagatccatcggtgtttctaacttcccaggtgccttattgttagacttattgagaggtgctaccattaagccttccgttttgcaagttgaacatcatccttacttgcaacaaccaagattgatcgaattcgctcaatctagaggtatcgctgttactgcctactcttccttcggtccacaatctttcgttgagttgaaccaaggtagagctttgaacacctctccattgttcgaaaacgaaactattaaggccattgctgctaagcatggtaagtctccagcccaagttttgttgagatggtcttctcaaagaggtatcgctattatcccaaagtctaatactgtcccaagattgttggaaaacaaggacgttaactcctttgatttggatgaacaagactttgctgacatcgctaaattggacatcaacttgagattcaacgacccatgggactgggacaagattccaatttttgtttaa

SEQ ID NO: 84 - protein, 318 aa, Unknown
  Scheffersomyces stipitis Sequence
MPSIKLNSGYDMPAVGFGCWKVDVDTCSEQIYRAIKTGYRLFDGAEDYANEKLVGAGVKKAIDEGIVKREDLFLTSKLWNNYHHPDNVEKALNRTLSDLQVDYVDLFLIHFPVTFKFVPLEEKYPPGFYCGKGDNFDYEDVPILETWKALEKLVKAGKIRSIGVSNFPGALLLDLLRGATIKPSVLQVEHHPYLQQPRLIEFAQSRGIAVTAYSSFGPQSFVELNQGRALNTSPLFENETIKAIAAKHGKSPAQVLLRWSSQRGIAIIPKSNTVPRLLENKDVNSFDLDEQDFADIAKLDINLRFNDPWDWDKIPIFV

SEQ ID NO: 85 - DNA, 984 bp, Saccharomyces cerevisiae; identical to SEQ ID NO: 16

SEQ ID NO: 86 - DNA, 984 bp, Artificial Sequence; identical to SEQ ID NO: 16
  Codon Optimized Saccharomyces cerevisiae Sequence

SEQ ID NO: 87 - protein, 327 aa, Saccharomyces cerevisiae; identical to SEQ ID NO: 17

SEQ ID NO: 88 - DNA, 1092 bp, Unknown
  Scheffersomyces stipitis Sequence
atgactgctaacccttccttggtgttgaacaagatcgacgacatttcgttcgaaacttacgatgccccagaaatctctgaacctaccgatgtcctcgtccaggtcaagaaaaccggtatctgtggttccgacatccacttctacgcccatggtagaatcggtaacttcgttttgaccaagccaatggtcttgggtcacgaatccgccggtactgttgtccaggttggtaagggtgtcacctctcttaaggttggtgacaacgtcgctatcgaaccaggtattccatccagattctccgacgaatacaagagcggtcactacaacttgtgtcctcacatggccttcgccgctactcctaactccaaggaaggcgaaccaaacccaccaggtaccttatgtaagtacttcaagtcgccagaagacttcttggtcaagttgccagaccacgtcagcttggaactcggtgctcttgttgagccattgtctgttggtgtccacgcctctaagttgggttccgttgctttcggcgactacgttgccgtctttggtgctggtcctgttggtcttttggctgctgctgtcgccaagaccttcggtgctaagggtgtcatcgtcgttgacattttcgacaacaagttgaagatggccaaggacattggtgctgctactcacaccttcaactccaagaccggtggttctgaagaattgatcaaggctttcggtggtaacgtgccaaacgtcgttttggaatgtactggtgctgaaccttgtatcaagttgggtgttgacgccattgccccaggtggtcgtttcgttcaagtcggtaacgctgctggtccagtcagcttcccaatcaccgttttcgccatgaaggaattgactttgttcggttctttcagatacggattcaacgactacaagactgctgttggaatctttgacactaactaccaaaacggtagagaaaatgctccaattgactttgaacaattgatcacccacagatacaagttcaaggacgctattgaagcctacgacttggtcagagccggtaagggtgctgtcaagtgtctcattgacggccctgagtaa

SEQ ID NO: 89 - DNA, 1092 bp, Artificial Sequence
  Codon Optimized Scheffersomyces stipitis
atgactgctaacccttccttggtgttgaacaagatcgacgacatttcgttcgaaacttacgatgccccagaaatctctgaacctaccgatgtcctcgtccaggtcaagaaaaccggtatctgtggttccgacatccacttctacgcccatggtagaatcggtaacttcgttttgaccaagccaatggtcttgggtcacgaatccgccggtactgttgtccaggttggtaagggtgtcacctctcttaaggttggtgacaacgtcgctatcgaaccaggtattccatccagattctccgacgaatacaagagcggtcactacaacttgtgtcctcacatggccttcgccgctactcctaactccaaggaaggcgaaccaaacccaccaggtaccttatgtaagtacttcaagtcgccagaagatttcttggtcaagttgccagaccacgtcagcttggaactcggtgctcttgttgagccattgtctgttggtgtccacgcctctaagttgggttccgttgctttcggcgactacgttgccgtctttggagcaggtcctgttggtcttttggctgctgctgtcgccaagaccttcggtgctaagggtgtcatcgtcgttgacattttcgacaacaagttgaagatggccaaggacattggagctgctactcacaccttcaactccaagaccggtggttctgaagaattgatcaaggctttcggtggtaacgtgccaaacgtcgttttggaatgtacaggtgcagaaccttgtatcaagttgggtgttgacgccattgccccaggtggtcgtttcgttcaagtcggtaacgctgctggtccagtcagcttcccaatcaccgttttcgccatgaaggaattgactttgttcggttctttcagatacggattcaacgactacaagactgctgttggaatctttgacactaactaccaaaacggtagagaaaatgctccaattgactttgaacaattgatcacccacagatacaagttcaaggacgctattgaagcctacgacttggtcagagccggtaagggtgctgtcaagtgtctcattgacggccctgagtaa

SEQ ID NO: 90 - protein, 363 aa, Unknown
  Scheffersomyces stipitis Sequence
MTANPSLVLNKIDDISFETYDAPEISEPTDVLVQVKKTGICGSDIHFYAHGRIGNFVLTKPMVLGHESAGTVVQVGKGVTSLKVGDNVAIEPGIPSRFSDEYKSGHYNLCPHMAFAATPNSKEGEPNPPGTLCKYFKSPEDFLVKLPDHVSLELGALVEPLSVGVHASKLGSVAFGDYVAVFGAGPVGLLAAAVAKTFGAKGVIVVDIFDNKLKMAKDIGAATHTFNSKTGGSEELIKAFGGNVPNVVLECTGAEPCIKLGVDAIAPGGRFVQVGNAAGPVSFPITVFAMKELTLFGSFRYGFNDYKTAVGIFDTNYQNGRENAPIDFEQLITHRYKFKDAIEAYDLVRAGKGAVKCLIDGPE

SEQ ID NO: 91 - DNA, 1092 bp, Unknown
  Trichoderma reesei Sequence
atggcgactcaaacgatcaacaaggatgcgatcagcaacctctccttcgtcctcaacaagcccggcgacgtgacctttgaggagcggccgaagccgaccatcacggaccccaacgacgtcctcgtcgccgtcaactacacgggcatctgcggctccgacgtgcactactgggtgcacggcgccatcgggcacttcgtcgtcaaggacccgatggtgctgggccacgagtcggccggcaccgtcgtcgaggtcggcccggccgtcaagagcctcaagcccggcgaccgcgtcgccctcgagcccggctacccgtgccggcggtgctccttctgccgcgccggcaaatacaacctgtgcccggacatggtcttcgccgccacgccgccgtaccacggcaccctgacgggcctgtgggcggcgcccgccgacttctgctacaagctgccggacggcgtgtcgctgcaggagggcgcgctgatcgagccgctggccgtggccgtccacattgtcaagcaggcccgcgtccagccgggccagtccgtcgtcgtcatgggcgccggccccgtcggcctgctgtgcgccgccgtggccaaggcgtacggcgcctccaccattgtcagcgtcgacatcgtgcagtccaagctcgactttgcgcgcggcttctgctcgacgcacacgtacgtctcgcagcgcatctcggctgaggacaacgcaaaggccatcaaggagctggcgggcctgcccggcggcgccgacgtcgtgattgacgccagcggcgcggagccgtcgatccagacgagcattcacgtcgtccgcatgggcggcacgtacgtccagggcggcatgggcaagagcgacatcacgttccccatcatggccatgtgcctcaaggaggtgacggtccggggctcgttccgctacggcgccggcgactacgagctggcggtcgagctggtccggacggggcgggtggacgtcaagaagctgattacgggcaccgtcagcttcaagcaggcggaggaggcgttccaaaaggtcaagtctggggaggccatcaagattctgattgccgggcccaacgagaaggtgtaa

SEQ ID NO: 92 - protein, 363 aa, Unknown
  Trichoderma reesei Sequence
MATQTINKDAISNLSFVLNKPGDVTFEERPKPTITDPNDVLVAVNYTGICGSDVHYWVHGAIGHFVVKDPMVLGHESAGTVVEVGPAVKSLKPGDRVALEPGYPCRRCSFCRAGKYNLCPDMVFAATPPYHGTLTGLWAAPADFCYKLPDGVSLQEGALIEPLAVAVHIVKQARVQPGQSVVVMGAGPVGLLCAAVAKAYGASTIVSVDIVQSKLDFARGFCSTHTYVSQRISAEDNAKAIKELAGLPGGADVVIDASGAEPSIQTSIHVVRMGGTYVQGGMGKSDITFPIMAMCLKEVTVRGSFRYGAGDYELAVELVRTGRVDVKKLITGTVSFKQAEEAFQKVKSGEAIKILIAGPNEKV

SEQ ID NO: 93 - DNA, 1314 bp, Unknown
  Pyromyces sp. Sequence
atggctaaggaatatttcccacaaattcaaaagattaagttcgaaggtaaggattctaagaatccattagccttccactactacgatgctgaaaaggaagtcatgggtaagaaaatgaaggattggttacgtttcgccatggcctggtggcacactctttgcgccgaaggtgctgaccaattcggtggaggtacaaagtctttcccatggaacgaaggtactgatgctattgaaattgccaagcaaaaggttgatgctggtttcgaaatcatgcaaaagcttggtattccatactactgtttccacgatgttgatcttgtttccgaaggtaactctattgaagaatacgaatccaaccttaaggctgtcgttgcttacctcaaggaaaagcaaaaggaaaccggtattaagcttctctggagtactgctaacgtcttcggtcacaagcgttacatgaacggtgcctccactaacccagactttgatgttgtcgcccgtgctattgttcaaattaagaacgccatagacgccggtattgaacttggtgctgaaaactacgtcttctggggtggtcgtgaaggttacatgagtctccttaacactgaccaaaagcgtgaaaaggaacacatggccactatgcttaccatggctcgtgactacgctcgttccaagggattcaagggtactttcctcattgaaccaaagccaatggaaccaaccaagcaccaatacgatgttgacactgaaaccgctattggtttccttaaggcccacaacttagacaaggacttcaaggtcaacattgaagttaaccacgctactcttgctggtcacactttcgaacacgaacttgcctgtgctgttgatgctggtatgctcggttccattgatgctaaccgtggtgactaccaaaacggttgggatactgatcaattcccaattgatcaatacgaactcgtccaagcttggatggaaatcatccgtggtggtggtttcgttactggtggtaccaacttcgatgccaagactcgtcgtaactctactgacctcgaagacatcatcattgcccacgtttctggtatggatgctatggctcgtgctcttgaaaacgctgccaagctcctccaagaatctccatacaccaagatgaagaaggaacgttacgcttccttcgacagtggtattggtaaggactttgaagatggtaagctcaccctcgaacaagtttacgaatacggtaagaagaacggtgaaccaaagcaaacttctggtaagcaagaactctacgaagctattgttgccatgtaccaataa

SEQ ID NO: 94 - DNA, 1314 bp, Unknown
  Codon Optimized Pyromyces sp. Sequence
atggccaaggaatacttcccacaaatccaaaagattaaattcgaaggtaaagattccaagaacccattggcttttcactactacgatgctgagaaggaagttatgggtaagaagatgaaggattggttgagattcgctatggcttggtggcacactttgtgcgctgaaggtgctgaccaattcggtggtggtactaagtctttcccatggaacgaaggtactgatgctattgaaatcgctaagcaaaaagtcgatgctggttttgagattatgcaaaaattgggtatcccatactactgtttccacgacgtcgacttggtttctgaaggtaattctatcgaagaatacgaatctaatttgaaggctgttgtcgcttacttaaaagaaaagcaaaaggagactggtattaagttgttgtggtccaccgctaacgtctttggtcataaaagatacatgaacggtgcttccaccaacccagacttcgatgtcgtcgccagagctatcgttcaaattaaaaacgccatcgacgctggtattgaattgggtgctgaaaattacgtcttttggggtggtcgtgaaggttacatgtctttgttgaacactgaccaaaagagagaaaaagaacacatggccactatgttgaccatggccagagattacgccagatctaagggtttcaagggtaccttcttaattgaaccaaaacctatggaaccaactaagcaccaatacgacgttgacactgaaactgctatcggttttttgaaggctcacaacttggataaggattttaaagtcaacattgaagttaaccatgctactttggctggtcacacttttgaacatgaattggcctgtgctgttgatgctggtatgttgggttctatcgatgctaatagaggtgactatcaaaacggttgggacactgatcaattcccaatcgatcaatatgaattagttcaagcttggatggaaattatcagaggtggtggtttcgttactggtggtactaacttcgatgctaagaccagaagaaactctactgatttggaagatattatcattgcccacgtttccggtatggatgccatggccagagctttggaaaacgccgccaagttattgcaagagtccccatacaccaagatgaaaaaggaacgttacgcttctttcgactctggtatcggtaaagacttcgaagatggtaagttgaccttggaacaagtttacgaatacggtaagaagaacggtgaacctaaacaaacctctggtaaacaagaattgtatgaagctattgttgccatgtaccaataa

SEQ ID NO: 95 - protein, 437 aa, Unknown
  Pyromyces sp. Sequence
MAKEYFPQIQKIKFEGKDSKNPLAFHYYDAEKEVMGKKMKDWLRFAMAWWHTLCAEGADQFGGGTKSFPWNEGTDAIEIAKQKVDAGFEIMQKLGIPYYCFHDVDLVSEGNSIEEYESNLKAVVAYLKEKQKETGIKLLWSTANVFGHKRYMNGASTNPDFDVVARAIVQIKNAIDAGIELGAENYVFWGGREGYMSLLNTDQKREKEHMATMLTMARDYARSKGFKGTFLIEPKPMEPTKHQYDVDTETAIGFLKAHNLDKDFKVNIEVNHATLAGHTFEHELACAVDAGMLGSIDANRGDYQNGWDTDQFPIDQYELVQAWMEIIRGGGFVTGGTNFDAKTRRNSTDLEDIIIAHVSGMDAMARALENAAKLLQESPYTKMKKERYASFDSGIGKDFEDGKLTLEQVYEYGKKNGEPKQTSGKQELYEAIVAMYQ

SEQ ID NO: 96 - DNA, 657 bp, Clostridium acetobutylicum
atgaactctaaaataattagatttgaaaatttaaggtcattctttaaagatgggatgacaattatgattggaggttttttaaactgtggcactccaaccaaattaattgattttttagttaatttaaatataaagaatttaacgattataagtaatgatacatgttatcctaatacaggtattggtaagttaatatcaaataatcaagtaaaaaagcttattgcttcatatataggcagcaacccagatactggcaaaaaactttttaataatgaacttgaagtagagctctctccccaaggaactctagtggaaagaatacgtgcaggcggatctggcttaggtggtgtactaactaaaacaggtttaggaactttgattgaaaaaggaaagaaaaaaatatctataaatggaacggaatatttgttagagctacctcttacagccgatgtagcattaattaaaggtagtattgtagatgaggccggaaacaccttctataaaggtactactaaaaactttaatccctatatggcaatggcagctaaaaccgtaatagttgaagctgaaaatttagttagctgtgaaaaactagaaaaggaaaaagcaatgacccccggagttcttataaattatatagtaaaggagcctgcataa

SEQ ID NO: 97 - protein, 218 aa, Clostridium acetobutylicum
MNSKIIRFENLRSFFKDGMTIMIGGFLNCGTPTKLIDFLVNLNIKNLTIISNDTCYPNTGIGKLISNNQVKKLIASYIGSNPDTGKKLFNNELEVELSPQGTLVERIRAGGSGLGGVLTKTGLGTLIEKGKKKISINGTEYLLELPLTADVALIKGSIVDEAGNTFYKGTTKNFNPYMAMAAKTVIVEAENLVSCEKLEKEKAMTPGVLINYIVKEPA

SEQ ID NO: 98 - DNA, 660 bp, Clostridium acetobutylicum
atgattaatgataaaaacctagcgaaagaaataatagccaaaagagttgcaagagaattaaaaaatggtcaacttgtaaacttaggtgtaggtcttcctaccatggttgcagattatataccaaaaaatttcaaaattactttccaatcagaaaacggaatagttggaatgggcgctagtcctaaaataaatgaggcagataaagatgtagtaaatgcaggaggagactatacaacagtacttcctgacggcacatttttcgatagctcagtttcgttttcactaatccgtggtggtcacgtagatgttactgttttaggggctctccaggtagatgaaaagggtaatatagccaattggattgttcctggaaaaatgctctctggtatgggtggagctatggatttagtaaatggagctaagaaagtaataattgcaatgagacatacaaataaaggtcaacctaaaattttaaaaaaatgtacacttcccctcacggcaaagtctcaagcaaatctaattgtaacagaacttggagtaattgaggttattaatgatggtttacttctcactgaaattaataaaaacacaaccattgatgaaataaggtctttaactgctgcagatttactcatatccaatgaacttagacccatggct

SEQ ID NO: 99 - protein, 221 aa, Clostridium acetobutylicum
MINDKNLAKEIIAKRVARELKNGQLVNLGVGLPTMVADYIPKNFKITFQSENGIVGMGASPKINEADKDVVNAGGDYTTVLPDGTFFDSSVSFSLIRGGHVDVTVLGALQVDEKGNIANWIVPGKMLSGMGGAMDLVNGAKKVIIAMRHTNKGQPKILKKCTLPLTAKSQANLIVTELGVIEVINDGLLLTEINKNTTIDEIRSLTAADLLISNELRPMAV

SEQ ID NO: 100 - DNA, 651 bp, Escherichia coli; identical to SEQ ID NO: 41

SEQ ID NO: 101 - protein, 216 aa, Escherichia coli; identical to SEQ ID NO: 43

SEQ ID NO: 102 - DNA, 663 bp, Escherichia coli; identical to SEQ ID NO: 44

SEQ ID NO: 103 - protein, 220 aa, Escherichia coli; identical to SEQ ID NO: 46

SEQ ID NO: 104 - DNA, 1563 bp, Mus musculus
atgcctgggtcacttcctttgaatgcagaggcttgctggccaaaagatgtgggaatcgttgcccttgaaatctactttccttctcaatatgtcgatcaagctgagttggaaaaatacgatggtgtagatgctggaaagtataccatcggcctgggccaggccaggatgggcttctgcacggatcgtgaagacatcaactctctttgcctgactgtggttcagaaactgatggagagacatagcctttcctatgattgcattgggcggctagaagttggaacagagacaatcatcgacaaatcgaaatcagtgaagtctaatttgatgcagctgtttgaggagtctgggaatacagatatagaaggaatagatacaaccaatgcatgctatgggggcacagctgcagtcttcaatgccgtgaactgggtcgaatccagctcttgggatggacgatatgctctggtagttgcaggagacattgctatatatgccacaggaaatgccagacctacaggtggagttggagctgtggccctgctaattgggccaaacgctcctctaatttttgaccgagggctccgtgggacacacatgcagcatgcctatgacttttacaagcctgacatgctctccgagtaccctgtggtcgacggaaagctctccatacagtgctacctcagcgccctggaccgctgctattctgtctaccgcaaaaagatccgtgcccagtggcagaaagagggaaaggataaagattttaccctgaatgattttggcttcatgatctttcactcaccatattgtaaactggtgcagaaatctctagctcggatgttcctgaatgactttcttaatgatcaaaacagagataaaaacagtatttacagtggactggaagcctttggggacgttaaattagaagatacttactttgacagagatgtagaaaaggcatttatgaaggctagttctgagctattcaaccagaaaacaaaggcgtctttgcttgtgtctaatcagaatggaaatatgtacacatcctctgtctatggttccctggcttctgtcctggcacagtactcacctcagcagttggcagggaagagggttggagtgttctcttacggttctggcttggctgccacgctgtactcccttaaagtcacacaagacgccacaccaggatctgcccttgataaaataacagcaagtttatgtgaccttaaatcaaggcttgactcgagaacttgtgtggcaccggatgtctttgctgaaaacatgaagctcagagaggacacacatcacttagccaactatattccccagtgttcaatagactcactctttgaaggaacgtggtatctggtcagagtggatgaaaaacacagaaggacttacgcccggcgccccttcacaaatgaccacagtttggatgaaggaatggggctcgtgcatagtaacacagcaacagagcatattccaagccctgctaagaaagtgccaagactccctgcaacctcggccgaatctgaatcagctgtcatcagtaacggggagcactga

SEQ ID NO: 105 - protein, 520 aa, Mus musculus
MPGSLPLNAEACWPKDVGIVALEIYFPSQYVDQAELEKYDGVDAGKYTIGLGQARMGFCTDREDINSLCLTVVQKLMERHSLSYDCIGRLEVGTETIIDKSKSVKSKLMQLFEESGNTDIEGIDTTNACYGGTAAVFNAVNWVESSSWDGRYALVVAGDIAIYATGNARPTGGVGAVALLIGPNAPLIFDRGLRGTHMQHAYDFYKPDMLSEYPVVDGKLSIQCYLSALDRCYSVYRKKIRAQWQKEGKDKDFTLNDFGFMIFHSPYCKLVQKSLARMFLNDFLNDQNRDKNSIYSGLEAFGDVKLEDTYFDRDVEKAFMKASSELFNQKTKASLLVSNQNGNMYTSSVYGSLASVLAQYSPQQLAGKRVGVFSYGSGLAATLYSLKVTQDATPGSALDKITASLCDLKSRLDSRTCVAPDVFAENMKLREDTHHLANYIPQCSIDSLFEGTWYLVRVDEKHRRTYARRPFTNDHSLDEGMGLVHSNTATEHIPSPAKKVPRLPATSAESESAVISNGEH

SEQ ID NO: 106 - DNA, 770 bp, Saccharomyces cerevisiae
atgaaactctcaactaaactttgttggtgtggtattaaaggaagacttaggccgcaaaagcaacaacaattacacaatacaaacttgcaaatgactgaactaaaaaaacaaaagaccgctgaacaaaaaaccagacctcaaaatgtcggtattaaaggtatccaaatttacatcccaactcaatgtgtcaaccaatctgagctagagaaatttgatggcgtttctcaaggtaaatacacaattggtctgggccaaaccaacatgtcttttgtcaatgacagagaagatatctactcgatgtccctaactgttttgtctaagttgatcaagagttacaacatcgacaccaacaaaattggtagattagaagtcggtactgaaactctgattgacaagtccaagtctgtcaagtctgtcttgatgcaattgtttggtgaaaacactgacgtcgaaggtattgacacgcttaatgcctgttacggtggtaccaacgcgttgttcaactctttgaactggattgaatctaacgcatgggatggtagagacgccattgtagtttgcggtgatattgccatctacgataagggtgccgcaagaccaaccggtggtgccggtactgttgctatgtggatcggtcctgatgctccaattgtatttgactctgtaagagcttcttacatggaacacgcctacgatttttacaagccagatttcaccagcgaatatccttacgtcgatggtcatttttcattaacttgttacgtcaaggc

SEQ ID NO: 107 - protein, 491 aa, Saccharomyces cerevisiae
MKLSTKLCWCGIKGRLRPQKQQQLHNTNLQMTELKKQKTAEQKTRPQNVGIKGIQIYIPTQCVNQSELEKFDGVSQGKYTIGLGQTNMSFVNDREDIYSMSLTVLSKLIKSYNIDTNKIGRLEVGTETLIDKSKSVKSVLMQLFGENTDVEGIDTLNACYGGTNALFNSLNWIESNAWDGRDAIVVCGDIAIYDKGAARPTGGAGTVAMWIGPDAPIVFDSVRASYMEHAYDFYKPDFTSEYPYVDGHFSLTCYVKALDQVYKSYSKKAISKGLVSDPAGSDALNVLKYFDYNVFHVPTCKLVTKSYGRLLYNDFRANPQLFPEVDAELATRDYDESLTDKNIEKTFVNVAKPFHKERVAQSLIVPTNTGNMYTASVYAAFASLLNYVGSDDLQGKRVGLFSYGSGLAASLYSCKIVGDVQHIIKELDITNKLAKRITETPKDYEAAIELRENAHLKKNFKPQGSIEHLQSGVYYLTNIDDKFRRSYDVKK

SEQ ID NO: 108 - DNA, 1167 bp, Lactobacillus crispatus
atgcaagtaggtattgatcaaattggactttttacgccagacaagtacgttgatatggtcgatttggcgaacgcaagaaagcaagatccaaataagtttttagttggcattggtcaaagagagatgagtgttgcggatattacgcaagatgcagtttcaatgggaattaatgcgactttaaagtttattgacaagattgataagaataaagtcggtctattaatttttgggactgaaagcagtattgatcaatcaaagtcagcttctttatttgtaaaaacagccttaaagttgaagccagaagtaagaacttttgaagtaaaggaagcttgctttggtttaacggcagccttaatgatggcacgtgattttgttcgggtacatcctgaacaaaccgcaattgtcatcggtagtgatattgctcgctatggtgttaatactgctggtgaggtaacacaaggagccggtagcgtggcaatgctcatcaaagctgacccaagcattttagccctaaataatggtcattcagcttacagcgaagatattaacgacttctggagaccaaattattctcgcaccgctttagttgacggcaagtattcgactcaagtttacttggatttcttcaagaagacctttactgattataagaagcaaaaaggattgaaaacaagcgactttgatgcgattacttaccatttgccatttactaagatggggatgaaggctaacaatattgctattgaggggcaagatcaagcaacaatgatcaagttggagcgtagttttgcggctgctaaacaattatcaagccgagtaggtaatatctacaccgcttcactttatatgagtttacttagtttgctagagaatggtgaattacccgctggctcattaattggcctgttttcatatggttcaggtgcaatggctgagttttatagtggcaagttggttgaaggatatgaaaaacaaattgatcctacagctgatcaagcaatgcttgatcggcggaagaagctgacagttaagcaatatgaagacgtcttcaatacggctttgttagatcctgaggatggcttagaattaactagcgacgatgaagtaggtacttggtattttgctggtactaaggatcatattcgtcaataccgcgtaaaagaataa

SEQ ID NO: 109 - protein, 388 aa, Lactobacillus crispatus
MQVGIDQIGLFTPDKYVDMVDLANARKQDPNKFLVGIGQREMSVADITQDAVSMGINATLKFIDKIDKNKVGLLIFGTESSIDQSKSASLFVKTALKLKPEVRTFEVKEACFGLTAALMMARDFVRVHPEQTAIVIGSDIARYGVNTAGEVTQGAGSVAMLIKADPSILALNNGHSAYSEDINDFWRPNYSRTALVDGKYSTQVYLDFFKKTFTDYKKQKGLKTSDFDAITYHLPFTKMGMKANNIAIEGQDQATMIKLERSFAAAKQLSSRVGNIYTASLYMSLLSLLENGELPAGSLIGLFSYGSGAMAEFYSGKLVEGYEKQIDPTADQAMLDRRKKLTVKQYEDVFNTALLDPEDGLELTSDDEVGTWYFAGTKDHIRQYRVKE

SEQ ID NO: 110 - DNA, 660 bp, Unknown
  Polaromonas naphthalenivorans Sequence
atgaccctgcatttaccttccagagtcaagctcgtcgatgtcggtccccgcgacggcctgcagaacgaaaaatcgcccgttcccgccgccgtgaaaatcgaactcgtgcatcgcctgcaggacgccggtctcacggaaatcgaggtcaccagttacgtttcgcccaaatgggtgccgcagatggctgacaacgccgaagtcatggccggcatccggcgcaagcccggcgtgcgctattcggtgctgacgcccaacatgcagggtctagaggcggcgatgaagccagcgcccgagttgtggcccgacgagatcgtggtgttcggcgcggccagcgaagccttcagccagcgcaacatcaactgctcgattgccgaaagcatcgagcgtttccggccggtggtggctgcggcccgggccaacaatatttatgttcgcggcgccatttcctgcaccgtcggctgcccctacgagggcgagattgcgccggagcgcgtcgaaatggtggcgcgcctgatgaaggacatcggcgtgcagcacatcggcgtggccgacacgattggcgtcggcacgccgctgaaggtgcagcgcgccctggaagcggcgctgaagcattacgacctcgatggcgtgtcgggccatttccatgacacctacggccag

SEQ ID NO: 111 - protein, 308 aa, Unknown
  Polaromonas naphthalenivorans Sequence
MTLHLPSRVKLVDVGPRDGLQNEKSPVPAAVKIELVHRLQDAGLTEIEVTSYVSPKWVPQMADNAEVMAGIRRKPGVRYSVLTPNMQGLEAAMKPAPELWPDEIVVFGAASEAFSQRNINCSIAESIERFRPVVAAARANNIYVRGAISCTVGCPYEGEIAPERVEMVARLMKDIGVQHIGVADTIGVGTPLKVQRALEAALKHYDLDGVSGHFHDTYGQALANTLASLQMGVWQFDTSVAGLGGCPYAKGATGNVATEDVVYLLHGMGIETGIDLDKLIDAGKFISDFLGRQPNSRAATALLNKRMN

SEQ ID NO: 112 - DNA, 770 bp, Thermoplasma acidophilum
atgacctacagatcaataggatcaactgcttatccaacgatcggcgttgttctcctgggcgggatagcaaatcccgtcacgaggacgccgctgcatacctcggcagggatagcatacagtgattcctgcggatcgataagatccgagaccaggatatacgccgatgaggctacgcacatatatttcaatggtacggaatcgacagatgacaatagatccgtgaggcgtgtgcttgatcgttattcaagcgtcttcgaggaggcgttcggtacgaagactgtttcatattcttcacagaacttcggcatactgagcggcagttccgatgctggagcggcatcgataggcgcagctatattgggcctcaaacccgatctggatccgcacgatgttgaaaatgacctcagggcggtctccgaaagcgcaggcaggagcctcttcggcggcttaacaataacttggagcgatggtttccatgcatatacggaaaagattcttgatcctgaggcattctccgggtattcgatcgttgccttcgcgtttgactatcagagaaatccgtccgatgtcatacaccagaatatagtgagaagcgatctctatccggccaggaagaagcatgccgatgaacatgcgcacatgatcaaggagtacgcaaagacaaacgacataaagggcatatttgatctggcccaggaagatacagaggaataccattccatacttcgtggcgtgggcgtgaacgtgataagggagaacatgcagaagct

SEQ ID NO: 113 - protein, 318 aa, Thermoplasma acidophilum
MTYRSIGSTAYPTIGVVLLGGIANPVTRTPLHTSAGIAYSDSCGSIRSETRIYADEATHIYFNGTESTDDNRSVRRVLDRYSSVFEEAFGTKTVSYSSQNFGILSGSSDAGAASIGAAILGLKPDLDPHDVENDLRAVSESAGRSLFGGLTITWSDGFHAYTEKILDPEAFSGYSIVAFAFDYQRNPSDVIHQNIVRSDLYPARKKHADEHAHMIKEYAKTNDIKGIFDLAQEDTEEYHSILRGVGVNVIRENMQKLISYLKLIRKDYWNAYIVTGGSNVYVAVESENADRLFSIENTFGSKKKMLRIVGGAWHRRPE

SEQ ID NO: 114 - DNA, 957 bp, Thermoplasma acidophilum
atgacctacagatcaataggatcaactgcttatccaacgatcggcgttgttctcctgggcgggatagcaaatcccgtcacgaggacgccgctgcatacctcggcagggatagcatacagtgattcctgcggatcgataagatccgagaccaggatatacgccgatgaggctacgcacatatatttcaatggtacggaatcgacagatgacaatagatccgtgaggcgtgtgcttgatcgttattcaagcgtcttcgaggaggcgttcggtacgaagactgtttcatattcttcacagaacttcggcatactgagcggcagttccgatgctggagcggcatcgataggcgcagctatattgggcctcaaacccgatctggatccgcacgatgttgaaaatgacctcagggcggtctccgaaagcgcaggcaggagcctcttcggcggcttaacaataacttggagcgatggtttccatgcatatacggaaaagattcttgatcctgaggcattctccgggtattcgatcgttgccttcgcgtttgactatcagagaaatccgtccgatgtcatacaccagaatatagtgagaagcgatgagtatccggccaggaagaagcatgccgatgaacatgcgcacatgatcaaggagtacgcaaagacaaacgacataaagggcatatttgatctggcccaggaagatacagaggaataccattccatacttcgtggcgtgggcgtgaacgtgataagggagaacatgcagaagctcatcagttacctgaagctgatcaggaaggattactggaatgcctacatcgtgaccggcggaagcaacgtctacgtggctgtagaaagcgagaatgcagataggctgttttcgatcgaaaataccttcggttcaaaaaagaagatgctcaggatagttggcggtgcctggcatagaagaccagagtga

SEQ ID NO: 115 - protein, 318 aa, Thermoplasma acidophilum
MTYRSIGSTAYPTIGVVLLGGIANPVTRTPLHTSAGIAYSDSCGSIRSETRIYADEATHIYFNGTESTDDNRSVRRVLDRYSSVFEEAFGTKTVSYSSQNFGILSGSSDAGAASIGAAILGLKPDLDPHDVENDLRAVSESAGRSLFGGLTITWSDGFHAYTEKILDPEAFSGYSIVAFAFDYQRNPSDVIHQNIVRSDEYPARKKHADEHAHMIKEYAKTNDIKGIFDLAQEDTEEYHSILRGVGVNVIRENMQKLISYLKLIRKDYWNAYIVTGGSNVYVAVESENADRLFSIENTFGSKKKMLRIVGGAWHRRPE

SEQ ID NO: 116 - DNA, 770 bp, Unknown
  Picrophilus torridus Sequence
atggaaaattacaatgttaagacaagggcgttcccaacaataggcataatactgcttggtgggatctcggataaaaagaacaggataccgctgcatacaacggcaggcatagcatatactggtataaacaatgatgtttacactgagacaaagctttatgtatcaaaagatgaaaaatgctatattgatggaaaggaaattgatttaaattcagatagatcaccatcgaaggttattgataaattcaagcatgaaatacttatgagagtaaatcttgatgatgaaaataacctttcaattgattcaaggaactttaatatattaagtggcagctcagattctggggccgctgcactgggagagtgcatagaatcaatttttgaatacaatataaatatatttacatttgaaaacgatcttcagaggatatcagaaagtgttggaagaagcctttacggtggtttaacagtaaactatgccaatggcagggaatcattaacagagccattacttgagcctgaggcatttaataactttacaataattggtgcacattttaacattgatagaaaaccatcaaatgagattcatgaaaatatcataaaacatgaaaattacagggaaagaataaaaagtgctgagagaaaggcgaaaaaacttgaggagctatcaaggaatgcaaacataaagggtatctttgaacttgcagaatccgatacagtggaataccataaaatgctccatgatgttggcgttgacataataaatga

SEQ ID NO: 117 - protein, 324 aa, Unknown
  Picrophilus torridus Sequence
MENYNVKTRAFPTIGIILLGGISDKKNRIPLHTTAGIAYTGINNDVYTETKLYVSKDEKCYIDGKEIDLNSDRSPSKVIDKFKHEILMRVNLDDENNLSIDSRNFNILSGSSDSGAAALGECIESIFEYNINIFTFENDLQRISESVGRSLYGGLTVNYANGRESLTEPLLEPEAFNNFTIIGAHFNIDRKPSNEIHENIIKHENYRERIKSAERKAKKLEELSRNANIKGIFELAESDTVEYHKMLHDVGVDIINDRMENLIERVKEMKNNFWNSYIVTGGPNVFVITEKKDVDKAMEGLNDLCDDIRLLKVAGKPQVISKNF

SEQ ID NO: 118 - DNA, 660 bp, Streptococcus mitis
atggatagagagcctgtaacagtacgttcctacgcaaatattgccattatcaaatactggggaaagaaaaaagaaaaagagatggttcctgctactagcagtatttctctgactttggaaaatatgtacacggagacgaccttgtcatctctaccgacggatgcgacagctgatgcattttatatcaatggtcagttacaaaatgaggcagagcatgtcaagatgagtaagattattgaccgctaccgtccagatggtgatggctttgttcgtatcgatactcaaaacagtatgcctaccgcagcgggcttgtcatcaagttctagtggtttgtctgccttggtcaaggcttgtaatgcttatttcaagcttggtttgaatcggagtcagttggcacaggaggctaagtttgcctcaggctcttcctctcggagtttttatggaccactcggtgcctgggataaggatagcggagagatttacccggtagagacaggcctgaaactagctatgattatgttggtgctagaagacaagaaaaaaccaatctctagccgtgatgggatgaaactttgtgtggaaacttcgacgacctttgacgactgggtgcgtcagtctgagaaggattatcaggatatgctggtttacctcaaggcaaat

SEQ ID NO: 119 - protein, 317 aa, Streptococcus mitis
MDREPVTVRSYANIAIIKYWGKKKEKEMVPATSSISLTLENMYTETTLSSLPTDATADAFYINGQLQNEAEHVKMSKIIDRYRPDGDGFVRIDTQNSMPTAAGLSSSSSGLSALVKACNAYFKLGLNRSQLAQEAKFASGSSSRSFYGPLGAWDKDSGEIYPVETGLKLAMIMLVLEDKKKPISSRDGMKLCVETSTTFDDWVRQSEKDYQDMLVYLKANDFAKVGELTEKNALAMHATTKTASPAFSYLTDASYEAMDFVRQLREQGEACYFTMDAGPNVKVLCQEKDLEHLSEIFGQRYRLIVSKTKDLSQDGCC

SEQ ID NO: 120 - DNA, 948 bp, Streptococcus gordonii
atggatcgaaagcctgtaagtgtcaaatcctatgccaatattgcaattgtcaaatattggggcaagaaagatgcagaaaagatgattccgtctacaagcagtatctcactgacactggaaaatatgtataccgagacgcagctgagtcctttgccggatacagcgactggtgatgagttttatattgacggtcagctgcaaagcccggcagaacatgccaaaatcagtaaaattattgaccgttttcgctctccagaagatggttttgtccgtgttgataccagcaataatatgccaacagcagcagggctgtcttccagctccagcggtctatctgctctggtcaaggcttgcaatgcttattttcagacaggctatcagacggaagaactggctcaactggccaagtttgcttcagggtcctctgctcggtctttctttggtccgctagcggcctgggataaggacagtggagccatctatccagtcaagacggatttgaagctagccatgattatgctggttctgcacgatgagaaaaagcccatttccagccgcgacggtatggagctctgtgctaaaacttccacaattttcccagattggattgcccaatctgccttggattatcaggccatgctaggctatttgcaggacaatgattttgccaaggttggtcaactgacggaagaaaatgcccttcggatgcatgctacaacagaaaaagcttatccgccgttttcttatctgacagaggagtcttatcaggctatggatgctgtcagaaagctacgggagcagggcgagcgttgctactttaccatggatgcggggccaaatgtcaaggtgctctgcttggaggaagatctagaccatttggctgccatatttgagaaggactatcgccttattgtctccaaaacaaaggacttgtcagatgaaagctag

SEQ ID NO: 121 - protein, 315 aa, Streptococcus gordonii
MDRKPVSVKSYANIAIVKYWGKKDAEKMIPSTSSISLTLENMYTETQLSPLPDTATGDEFYIDGQLQSPAEHAKISKIIDRFRSPEDGFVRVDTSNNMPTAAGLSSSSSGLSALVKACNAYFQTGYQTEELAQLAKFASGSSARSFFGPLAAWDKDSGAIYPVKTDLKLAMIMLVLHDEKKPISSRDGMELCAKTSTIFPDWIAQSALDYQAMLGYLQDNDFAKVGQLTEENALRMHATTEKAYPPFSYLTEESYQAMDAVRKLREQGERCYFTMDAGPNVKVLCLEEDLDHLAAIFEKDYRLIVSKTKDLSDES

SEQ ID NO: 122 - DNA, 1476 bp, Saccharomyces cerevisiae
atgaaactctcaactaaactttgttggtgtggtattaaaggaagacttaggccgcaaaagcaacaacaattacacaatacaaacttgcaaatgactgaactaaaaaaacaaaagaccgctgaacaaaaaaccagacctcaaaatgtcggtattaaaggtatccaaatttacatcccaactcaatgtgtcaaccaatctgagctagagaaatttgatggcgtttctcaaggtaaatacacaattggtctgggccaaaccaacatgtcttttgtcaatgacagagaagatatctactcgatgtccctaactgttttgtctaagttgatcaagagttacaacatcgacaccaacaaaattggtagattagaagtcggtactgaaactctgattgacaagtccaagtctgtcaagtctgtcttgatgcaattgtttggtgaaaacactgacgtcgaaggtattgacacgcttaatgcctgttacggtggtaccaacgcgttgttcaactctttgaactggattgaatctaacgcatgggatggtagagacgccattgtagtttgcggtgatattgccatctacgataagggtgccgcaagaccaaccggtggtgccggtactgttgctatgtggatcggtcctgatgctccaattgtatttgactctgtaagagcttcttacatggaacacgcctacgatttttacaagccagatttcaccagcgaatatccttacgtcgatggtcatttttcattaacttgttacgtcaaggctcttgatcaagtttacaagagttattccaagaaggctatttctaaagggttggttagcgatcccgctggttcggatgctttgaacgttttgaaatatttcgactacaacgttttccatgttccaacctgtaaattggtcacaaaatcatacggtagattactatataacgatttcagagccaatcctcaattgttcccagaagttgacgccgaattagctactcgcgattatgacgaatctttaaccgataagaacattgaaaaaacttttgttaatgttgctaagccattccacaaagagagagttgcccaatctttgattgttccaacaaacacaggtaacatgtacaccgcatctgtttatgccgcctttgcatctctattaaactatgttggatctgacgacttacaaggcaagcgtgttggtttattttcttacggttccggtttagctgcatctctatattcttgcaaaattgttggtgacgtccaacatattatcaaggaattagatattactaacaaattagccaagagaatcaccgaaactccaaaggattacgaagctgccatcgaattgagagaaaatgcccatttgaagaagaacttcaaacctcaaggttccattgagcatttgcaaagtggtgtttactacttgaccaacatcgatgacaaatttagaagatcttacgatgttaaaaaataa

SEQ ID NO: 123 - protein, 491 aa, Saccharomyces cerevisiae; identical to SEQ ID NO: 107

SEQ ID NO: 124 - DNA, 816 bp, Pseudomonas putida
atgagcgatttcagcaccctcgaagtgatccgcgacccgcgcggcttcgccaccctgtggttaagccgtgaggacaagaacaacgccttcaatgcgcagatgatccgcgagctgatcgtggccatcgaccagttggccgaagacgccagcctgcgctttgtgctgctgcgcggccgtggccggcacttcagcgccggtgccgacctggcctggatgcagcagtcggcgcaactggacttcaacaccaacctggatgatgcccacgaactgggcgagctgatgtacgccctgcatcgcctcaaggccccgaccctggccgtggtgcaaggtgcagcctttggcggcgcgctgggcctgatcagctgctgcgacatggccatcggcgccgaagacgcccaactgtgcctgtcggaagtacgcatcggcctggccccggcggtcatcagcccgttcgtggtcaaggccattggcgaacgcgccgcgcgccgctacgccctcaccgccgagcgtttcactggcgtgcgcgcacgcgagctgggcctgctggccgaggtgtacccggccagcgaactggacgaccacgtcgaagcctgggtaagcaacctgctgcagaacagcccgcaagcattgcgcgccaccaaggacttgctgcgcgaagtggacgacggcgaactcagcccggccctgcgccgttactgcgaaaacaccatcgcccgtatccgcgtcagcgccgaaggccaggagggcctgcgcgctttcctggaaaaacgccgccctgcctggcaaaccgttgacaagaaggagccgcgcccatga

SEQ ID NO: 125 - protein, 271 aa, Pseudomonas putida
MSDFSTLEVIRDPRGFATLWLSREDKNNAFNAQMIRELIVAIDQLAEDASLRFVLLRGRGRHFSAGADLAWMQQSAQLDFNTNLDDAHELGELMYALHRLKAPTLAVVQGAAFGGALGLISCCDMAIGAEDAQLCLSEVRIGLAPAVISPFVVKAIGERAARRYALTAERFTGVRARELGLLAEVYPASELDDHVEAWVSNLLQNSPQALRATKDLLREVDDGELSPALRRYCENTIARIRVSAEGQEGLRAFLEKRRPAWQTVDKKEPRP

SEQ ID NO: 126 - DNA, 1608 bp, Pseudomonas aeruginosa
atggccatcctgcacacccagatcaatccacgctccgccgagttcgcggccaacgccgcgaccatgctggaacaggtcaacgccctgcgcaccctcctcggccgcatccacgaaggcggcggtagcgccgcccaggcccggcacagcgcgcgcggcaagctgctggtgcgcgaacgcatcaaccgcctgctcgaccccggctcgccgttcctcgagctttccgccctcgccgcccacgaagtctacggcgaagaggtcgccgccgccggcatcgtcgccgggatcggccgggtcgaaggggtggaatgcatgatcgtcggcaacgatgccacggtgaagggcggcacctactatccgctgaccgtgaagaagcacctgcgggcccaggccatcgccctggagaaccgcctgccatgcatctacctggtggactctggcggcgccaacctgccgcgccaggacgaggtgttccccgaccgcgagcacttcggccggatcttcttcaaccaggccaacatgagtgcccgcggcatcccgcagatcgccgtggtcatgggctcctgcaccgccggcggggcctacgtgccggcgatgtccgacgaaaccgtgatggtgcgcgaacaggccaccatcttcctcgccgggccgccgctggtgaaggccgctaccggcgaggtggtcagcgccgaggaacttggcggcgccgacgtgcactgcaaggtctcaggggtcgccgaccactatgccgaggacgatgaccatgccctggccatcgcccgccgctgcgtcgccaacctcaactggcgcaagcagggccagctgcaatgccgtgcaccgcgcgcgccgctgtaccccgccgaggagctgtacggggtgattcccgccgacagcaagcagccctacgacgtgcgcgaagtgatcgcacggctggtggacggctccgagttcgacgaattcaaggcgctgttcggcaccaccctggtctgcggcttcgcccacctgcacggctatccgatcgccatcctggccaacaacgggatcctcttcgccgaggccgcgcagaaaggcgcgcacttcatcgagttggcctgccagcgtggcatcccgctgctgttcctgcagaacatcaccggtttcatggtcggccagaagtacgaggctggcggcatcgccaagcacggcgccaagctggtgaccgcggtggcctgcgcgcgggtgccgaagttcaccgtgctgatcggcggcagcttcggcgccggcaactacggcatgtgcggacgcgcctacgacccgcgcttcctgtggatgtggccgaacgcgaggatcggcgtgatgggcggcgaacaggccgccggggtgctcgcccaggtcaagcgcgagcaggccgagcgcgccggccagcagctcggcgtcgaagaggaggcgaagatcaaggcgccgatcctcgagcagtacgagcaccagggccatccctactactccagcgcgcgactgtgggacgacggcgtgatcgatccggcgcagacccgcgaggtcctcgccctggcgctttccgccgccctcaacgcccccatcgagccgaccgccttcggcgtgttccgcatgtga

SEQ ID NO: 127 - protein, 535 aa, Pseudomonas aeruginosa
MAILHTQINPRSAEFAANAATMLEQVNALRTLLGRIHEGGGSAAQARHSARGKLLVRERINRLLDPGSPFLELSALAAHEVYGEEVAAAGIVAGIGRVEGVECMIVGNDATVKGGTYYPLTVKKHLRAQAIALENRLPCIYLVDSGGANLPRQDEVFPDREHFGRIFFNQANMSARGIPQIAVVMGSCTAGGAYVPAMSDETVMVREQATIFLAGPPLVKAATGEVVSAEELGGADVHCKVSGVADHYAEDDDHALAIARRCVANLNWRKQGQLQCRAPRAPLYPAEELYGVIPADSKQPYDVREVIARLVDGSEFDEFKALFGTTLVCGFAHLHGYPIAILANNGILFAEAAQKGAHFIELACQRGIPLLFLQNITGFMVGQKYEAGGIAKHGAKLVTAVACARVPKFTVLIGGSFGAGNYGMCGRAYDPRFLWMWPNARIGVMGGEQAAGVLAQVKREQAERAGQQLGVEEEAKIKAPILEQYEHQGHPYYSSARLWDDGVIDPAQTREVLALALSAALNAPIEPTAFGVFRM

SEQ ID NO: 128 - DNA, 1968 bp, Pseudomonas aeruginosa
atgaacccggactaccgcagcatccagcgcctcctggtcgccaaccgcggcgagatcgcctgccgggtgatgcgcagcgcgcgcgccctcggcatcggcagcgtcgccgtgcacagcgacatcgaccgccacgcccgccacgtcgccgaagccgacatcgccgtcgacctgggcggcgccaagcccgccgacagctacctgcgcggcgacaggatcatcgcagctgccctcgccagcggcgcccaggcgatccaccccggctacggcttcctctcggagaacgccgacttcgcccgcgcctgcgaggaagccggcctgctcttcctcggaccgccggcggcggccatcgacgccatgggcagcaagtcggccgccaaggcgctgatggaagaagccggcgtgccgctggtgcccggctatcacggcgaagcccaggacctcgagactttccgccgggaagccgggcgcatcggctacccggtgctgctcaaggccgccgctggcggcggcggcaagggcatgaaggtggtggagcgcgaggccgagctggccgaggccctttcctccgcccagcgcgaggccaaggccgccttcggcgacgcgcgtatgctggtggagaaatacctgctgaagccgcgccacgtggagatccaggtattcgccgaccgccatggccactgcctgtacctcaacgaacgcgactgttcgatccagcgccgccaccagaaggtcgtcgaggaagcccccgcccccggtctcggcgcggaactgcgccgggccatgggcgaggccgcggtacgcgcggcgcaggcgatcggctacgtcggcgccggtaccgtcgaattcctcctcgacgaacgcggccagttcttcttcatggaaatgaacacccgcctgcaggtggaacacccggtcaccgaggccatcaccggcctcgacctggtcgcctggcagatccgcgtcgctcgcggcgaggcgctaccgctgacgcaggaacaggtaccgctgaacggccacgccatcgaagtacggctctatgcggaagaccccgagggcgacttcctccccgccagcggccgcctgatgctataccgcgaagcggccgccggccccggccggcgggtcgacagcggggtacgcgaaggcgacgaggtctcgccgttctacgacccgatgctggccaagctgatcgcctggggcgaaacccgcgaggaagcccgccagcgcctgctggcgatgctggcggaaacctcggtcggcggcctgcgcaccaacctggcgttcctccgccgcatcctcggccatccggcgttcgccgccgccgaactggacaccgggttcatcgcgcgccaccaagacgacctgctgccggcgccgcaagcgctgccggagcatttctggcaagccgccgccgaagcctggctgcagagcgaaccgggccaccgtcgcgacgacgacccgcattcgccgtggagccgcaacgacggctggcgcagcgccctggcgcgggagtccgacctgatgctgcgctgccgcgacgaacgccgctgcgtccgcctgcgccacgccagccccagccagtatcgcctcgacggcgacgacctggtcagccgggtggacggtgtcacccgtcgctcggcggcgttgcgccgcggacgccaattgttcctcgaatgggagggcgaactgctggccatcgaagccgtcgacccgatcgccgaggccgaggccgcccatgcccaccagggcggtttgagcgcgccgatgaacggcagtatcgtgcgggtcctggtcgagcccggccagacggtcgaagccggcgccaccctggtggtgctggaggcgatgaagatggaacacagcatccgcgcgccccacgccggggtagtgaaggcgctgtattgcagcgagggcgaactggtcgaggaaggcacgccgctggtggagctggacgagaaccaggcctga

SEQ ID NO: 129 - protein, 655 aa, Pseudomonas aeruginosa
MNPDYRSIQRLLVANRGEIACRVMRSARALGIGSVAVHSDIDRHARHVAEADIAVDLGGAKPADSYLRGDRIIAAALASGAQAIHPGYGFLSENADFARACEEAGLLFLGPPAAAIDAMGSKSAAKALMEEAGVPLVPGYHGEAQDLETFRREAGRIGYPVLLKAAAGGGGKGMKVVEREAELAEALSSAQREAKAAFGDARMLVEKYLLKPRHVEIQVFADRHGHCLYLNERDCSIQRRHQKVVEEAPAPGLGAELRRAMGEAAVRAAQAIGYVGAGTVEFLLDERGQFFFMEMNTRLQVEHPVTEAITGLDLVAWQIRVARGEALPLTQEQVPLNGHAIEVRLYAEDPEGDFLPASGRLMLYREAAAGPGRRVDSGVREGDEVSPFYDPMLAKLIAWGETREEARQRLLAMLAETSVGGLRTNLAFLRRILGHPAFAAAELDTGFIARHQDDLLPAPQALPEHFWQAAAEAWLQSEPGHRRDDDPHSPWSRNDGWRSALARESDLMLRCRDERRCVRLRHASPSQYRLDGDDLVSRVDGVTRRSAALRRGRQLFLEWEGELLAIEAVDPIAEAEAAHAHQGGLSAPMNGSIVRVLVEPGQTVEAGATLVVLEAMKMEHSIRAPHAGVVKALYCSEGELVEEGTPLVELDENQA

SEQ ID NO: 130 - DNA, 1164 bp, Escherichia coli
atggaacaggttgtcattgtcgatgcaattcgcaccccgatgggccgttcgaagggcggtgcttttcgtaacgtgcgtgcagaagatctctccgctcatttaatgcgtagcctgctggcgcgtaacccggcgctggaagcggcggccctcgacgatatttactggggttgtgtgcagcagacgctggagcagggttttaatatcgcccgtaacgcggcgctgctggcagaagtaccacactctgtcccggcggttaccgttaatcgcttgtgtggttcatccatgcaggcactgcatgacgcagcacgaatgatcatgactggcgatgcgcaggcatgtctggttggcggcgtggagcatatgggccatgtgccgatgagtcacggcgtcgattttcaccccggcctgagccgcaatgtcgccaaagcggcgggcatgatgggcttaacggcagaaatgctggcgcgtatgcacggtatcagccgtgaaatgcaggatgcctttgccgcgcggtcacacgcccgcgcctgggccgccacgcagtcggccgcatttaaaaatgaaatcatcccgaccggtggtcacgatgccgacggcgtcctgaagcagtttaattacgacgaagtgattcgcccggaaaccaccgtggaagccctcgccacgctgcgtccggcgtttgatccagtaaacggtatggtaacggcgggcacatcttctgcactttccgatggcgcagctgccatgctggtgatgagtgaaagccgcgcccatgaattaggtcttaagccgcgcgctcgtgtgcgttcgatggcggtcgttggttgtgacccatcgattatgggttacggcccggttccggcctcgaaactggcgctgaaaaaagcggggctttctgccagcgatatcggcgtgtttgaaatgaacgaagcctttgccgcgcagatcctgccatgtattaaagatctgggactaattgagcagattgacgagaagatcaacctcaacggtggcgcgatcgcgctgggtcatccgctgggttgttccggtgcgcgtatcagcaccacgctgctgaatctgatggaacgcaaagacgttcagtttggtctggcgacgatgtgtatcggtctgggtcagggtattgcgacggtgtttgagcgggtttaa

SEQ ID NO: 131 - protein, 387 aa, Escherichia coli
MEQVVIVDAIRTPMGRSKGGAFRNVRAEDLSAHLMRSLLARNPALEAAALDDIYWGCVQQTLEQGFNIARNAALLAEVPHSVPAVTVNRLCGSSMQALHDAARMIMTGDAQACLVGGVEHMGHVPMSHGVDFHPGLSRNVAKAAGMMGLTAEMLARMHGISREMQDAFAARSHARAWAATQSAAFKNEIIPTGGHDADGVLKQFNYDEVIRPETTVEALATLRPAFDPVNGMVTAGTSSALSDGAAAMLVMSESRAHELGLKPRARVRSMAVVGCDPSIMGYGPVPASKLALKKAGLSASDIGVFEMNEAFAAQILPCIKDLGLIEQIDEKINLNGGAIALGHPLGCSGARISTTLLNLMERKDVQFGLATMCIGLGQGIATVFERV

SEQ ID NO: 132 - DNA, 2190 bp, Escherichia coli
atgctttacaaaggcgacaccctgtaccttgactggctggaagatggcattgccgaactggtatttgatgccccaggttcagttaataaactcgacactgcgaccgtcgccagcctcggcgaggccatcggcgtgctggaacagcaatcagatctaaaagggctgctgctgcgttcgaacaaagcagcctttatcgtcggtgctgatatcaccgaatttttgtccctgttcctcgttcctgaagaacagttaagtcagtggctgcactttgccaatagcgtgtttaatcgcctggaagatctgccggtgccgaccattgctgccgtcaatggctatgcgctgggcggtggctgcgaatgcgtgctggcgaccgattatcgtctggcgacgccggatctgcgcatcggtctgccggaaaccaaactgggcatcatgcctggctttggcggttctgtacgtatgccacgtatgctgggcgctgacagtgcgctggaaatcattgccgccggtaaagatgtcggcgcggatcaggcgctgaaaatcggtctggtggatggcgtagtcaaagcagaaaaactggttgaaggcgcaaaggcggttttacgccaggccattaacggcgacctcgactggaaagcaaaacgtcagccgaagctggaaccactaaaactgagcaagattgaagccaccatgagcttcaccatcgctaaagggatggtcgcacaaacagcggggaaacattatccggcccccatcaccgcagtaaaaaccattgaagctgcggcccgttttggtcgtgaagaagccttaaacctggaaaacaaaagttttgtcccgctggcgcataccaacgaagcccgcgcactggtcggcattttccttaacgatcaatatgtaaaaggcaaagcgaagaaactcaccaaagacgttgaaaccccgaaacaggccgcggtgctgggtgcaggcattatgggcggcggcatcgcttaccagtctgcgtggaaaggcgtgccggttgtcatgaaagatatcaacgacaagtcgttaaccctcggcatgaccgaagccgcgaaactgctgaacaagcagcttgagcgcggcaagatcgatggtctgaaactggctggcgtgatctccacaatccacccaacgctcgactacgccggatttgaccgcgtggatattgtggtagaagcggttgttgaaaacccgaaagtgaaaaaagccgtactggcagaaaccgaacaaaaagtacgccaggataccgtgctggcgtctaacacttcaaccattcctatcagcgaactggccaacgcgctggaacgcccggaaaacttctgcgggatgcacttctttaacccggtccaccgaatgccgttggtagaaattattcgcggcgagaaaagctccgacgaaaccatcgcgaaagttgtcgcctgggcgagcaagatgggcaagacgccgattgtggttaacgactgccccggcttctttgttaaccgcgtgctgttcccgtatttcgccggtttcagccagctgctgcgcgacggcgcggatttccgcaagatcgacaaagtgatggaaaaacagtttggctggccgatgggcccggcatatctgctggacgttgtgggcattgataccgcgcatcacgctcaggctgtcatggcagcaggcttcccgcagcggatgcagaaagattaccgcgatgccatcgacgcgctgtttgatgccaaccgctttggtcagaagaacggcctcggtttctggcgttataaagaagacagcaaaggtaagccgaagaaagaagaagacgccgccgttgaagacctgctggcagaagtgagccagccgaagcgcgatttcagcgaagaagagattatcgcccgcatgatgatcccgatggtcaacgaagtggtgcgctgtctggaggaaggcattatcgccactccggcggaagcggatatggcgctggtctacggcctgggcttccctccgttccacggcggcgcgttccgctggctggacaccctcggtagcgcaaaatacctcgatatggcacagcaatatcagcacctcggcccgctgtatgaagtgccggaaggtctgcgtaataaagcgcgtcataacgaaccgtactatcctccggttgagccagcccgtccggttggcgacctgaaaacggcttaa

SEQ ID NO: 133 - protein, 729 aa, Escherichia coli
MLYKGDTLYLDWLEDGIAELVFDAPGSVNKLDTATVASLGEAIGVLEQQSDLKGLLLRSNKAAFIVGADITEFLSLFLVPEEQLSQWLHFANSVFNRLEDLPVPTIAAVNGYALGGGCECVLATDYRLATPDLRIGLPETKLGIMPGFGGSVRMPRMLGADSALEIIAAGKDVGADQALKIGLVDGVVKAEKLVEGAKAVLRQAINGDLDWKAKRQPKLEPLKLSKIEATMSFTIAKGMVAQTAGKHYPAPITAVKTIEAAARFGREEALNLENKSFVPLAHTNEARALVGIFLNDQYVKGKAKKLTKDVETPKQAAVLGAGIMGGGIAYQSAWKGVPVVMKDINDKSLTLGMTEAAKLLNKQLERGKIDGLKLAGVISTIHPTLDYAGFDRVDIVVEAVVENPKVKKAVLAETEQKVRQDTVLASNTSTIPISELANALERPENFCGMHFFNPVHRMPLVEIIRGEKSSDETIAKVVAWASKMGKTPIVVNDCPGFFVNRVLFPYFAGFSQLLRDGADFRKIDKVMEKQFGWPMGPAYLLDVVGIDTAHHAQAVMAAGFPQRMQKDYRDAIDALFDANRFGQKNGLGFWRYKEDSKGKPKKEEDAAVEDLLAEVSQPKRDFSEEEIIARMMIPMVNEVVRCLEEGIIATPAEADMALVYGLGFPPFHGGAFRWLDTLGSAKYLDMAQQYQHLGPLYEVPEGLRNKARHNEPYYPPVEPARPVGDLKTA

SEQ ID NO: 134 - DNA, 861 bp, Escherichia coli
atgagtcaggcgctaaaaaatttactgacattgttaaatctggaaaaaattgaggaaggactctttcgcggccagagtgaagatttaggtttacgccaggtgtttggcggccaggtcgtgggtcaggccttgtatgctgcaaaagagaccgtccctgaagagcggctggtacattcgtttcacagctactttcttcgccctggcgatagtaagaagccgattatttatgatgtcgaaacgctgcgtgacggtaacagcttcagcgcccgccgggttgctgctattcaaaacggcaaaccgattttttatatgactgcctctttccaggcaccagaagcgggtttcgaacatcaaaaaacaatgccgtccgcgccagcgcctgatggcctcccttcggaaacgcaaatcgcccaatcgctggcgcacctgctgccgccagtgctgaaagataaattcatctgcgatcgtccgctggaagtccgtccggtggagtttcataacccactgaaaggtcacgtcgcagaaccacatcgtcaggtgtggatccgcgcaaatggtagcgtgccggatgacctgcgcgttcatcagtatctgctcggttacgcttctgatcttaacttcctgccggtagctctacagccgcacggcatcggttttctcgaaccggggattcagattgccaccattgaccattccatgtggttccatcgcccgtttaatttgaatgaatggctgctgtatagcgtggagagcacctcggcgtccagcgcacgtggctttgtgcgcggtgagttttatacccaagacggcgtactggttgcctcgaccgttcaggaaggggtgatgcgtaatcacaattaa

SEQ ID NO: 135 - protein, 286 aa, Escherichia coli
MSQALKNLLTLLNLEKIEEGLFRGQSEDLGLRQVFGGQVVGQALYAAKETVPEERLVHSFHSYFLRPGDSKKPIIYDVETLRDGNSFSARRVAAIQNGKPIFYMTASFQAPEAGFEHQKTMPSAPAPDGLPSETQIAQSLAHLLPPVLKDKFICDRPLEVRPVEFHNPLKGHVAEPHRQVWIRANGSVPDDLRVHQYLLGYASDLNFLPVALQPHGIGFLEPGIQIATIDHSMWFHRPFNLNEWLLYSVESTSASSARGFVRGEFYTQDGVLVASTVQEGVMRNHN

SEQ ID NO: 136 - DNA, 1056 bp, Clostridium beijerinckii
atgaaaggttttgcaatgctaggtattaataagttaggatggatcgaaaaagaaaggccagttgcgggttcatatgatgctattgtacgcccattagcagtatctccgtgtacatcagatatacatactgtttttgagggagctcttggagataggaagaatatgattttagggcatgaagctgtaggtgaagttgttgaagtaggaagtgaagtgaaggattttaaacctggtgacagagttatagttccttgtacaactccagattggagatctttggaagttcaagctggttttcaacagcactcaaacggtatgctcgcaggatggaaattttcaaatttcaaggatggagtttttggtgaatattttcatgtaaatgatgcggatatgaatcttgcgattctacctaaagacatgccattagaaaatgctgttatgataacagatatgatgactactggatttcatggagcagaacttgcagatattcaaatgggttcaagtgttgtggtaattggcattggagctgttggcttaatgggaatagcaggtgctaaattacgtggagcaggtagaataattggagtggggagcaggccgatttgtgttgaggctgcaaaattttatggagcaacagatattctaaattataaaaatggtcatatagttgatcaagttatgaaattaacgaatggaaaaggcgttgaccgcgtaattatggcaggcggtggttctgaaacattatcccaagcagtatctatggttaaaccaggaggaataatttctaatataaattatcatggaagtggagatgctttactaataccacgtgtagaatggggatgtggaatggctcacaagactataaaaggaggtctttgtcctgggggacgtttgagagcagaaatgttaagagatatggtagtatataatcgtgttgatctaagtaaattagttacacatgtatatcatggatttgatcacatagaagaagcactgttattaatgaaagacaagccaaaagacttaattaaagcagtagttatattataa

SEQ ID NO: 137 - DNA, 1056 bp, Clostridium beijerinckii
atgaaagggtttgccatgttaggtatcaataaactgggctggattgaaaaagagcgcccggtggcgggttcatacgatgcaattgttcgtccgctggccgtcagtccgtgcaccagcgacatccatacagtctttgaaggtgccctgggtgatcggaaaaacatgattctgggccatgaagccgtaggcgaagtagtggaagtgggcagcgaggtaaaggatttcaaaccgggtgatcgcgtaattgttccttgcacgaccccagattggcgctcactggaagttcaggctggttttcagcagcatagtaacggtatgttagcaggctggaagtttagcaattttaaagacggggtgttcggggagtattttcatgtcaacgatgcggacatgaatctggctattttacctaaagatatgccgctggagaacgcagtgatgattaccgacatgatgacgacaggctttcacggtgcagaactggctgacatccaaatgggctccagtgtggtggttatcggtattggtgcggtcgggctgatgggtatcgcgggcgcgaaattacggggcgctggtcgcatcatcggtgtcggcagccgtccaatttgcgttgaagcagctaaattctatggtgccacggacattctgaactataaaaatggtcacatcgtcgatcaggtgatgaaactgaccaatggcaaaggtgtggaccgcgtgatcatggcgggcggcggctcagagactttatctcaagcggtgtctatggttaaacctgggggcatcatttctaatattaactatcatggctccggcgacgcattactgatcccgcgtgttgaatggggctgtgggatggcccacaaaaccattaaaggggggttatgtccgggtggtcgcctgcgtgccgaaatgctgcgtgacatggtggtttacaaccgtgtggatctgtccaaactggtaactcacgtataccacggtttcgatcacattgaagaggcgctgctgctgatgaaggataagccaaaggatctgattaaggcggttgttatcctgtaa

SEQ ID NO: 138 - protein, 351 aa, Clostridium beijerinckii
MKGFAMLGINKLGWIEKERPVAGSYDAIVRPLAVSPCTSDIHTVFEGALGDRKNMILGHEAVGEVVEVGSEVKDFKPGDRVIVPCTTPDWRSLEVQAGFQQHSNGMLAGWKFSNFKDGVFGEYFHVNDADMNLAILPKDMPLENAVMITDMMTTGFHGAELADIQMGSSVVVIGIGAVGLMGIAGAKLRGAGRIIGVGSRPICVEAAKFYGATDILNYKNGHIVDQVMKLTNGKGVDRVIMAGGGSETLSQAVSMVKPGGIISNINYHGSGDALLIPRVEWGCGMAHKTIKGGLCPGGRLRAEMLRDMVVYNRVDLSKLVTHVYHGFDHIEEALLLMKDKPKDLIKAVVIL

SEQ ID NO: 139 - DNA, 2580 bp, Unknown
  Clostridium carboxidivorans Sequence
atgaaggtaactaatgttgaagaactgatgaaaaaaatgcaggaagtgcaaaatgctcaaaaaaaatttgggagttttactcaggaacaagtagatgaaattttcaggcaagcagcactagcagctaacagtgccagaatagatctagctaaaatggcagtggaagaaactaaaatgggaattgtagaggataaggttataaaaaatcattttgttgcagaatacatatataataagtataaaaatgaaaaaacttgtgggattttggaagaagatgaaggctttggaatggttaaaattgcagaacctgtaggtgtgattgcagcagtaattccaacaacaaatccaacatctacagcaatatttaaagcattattagctttgaaaacaagaaatggtataattttttcaccacatccaagagcaaaaaagtgtactattgcagcagctaagttagttcttgatgctgcagttaaagcaggtgctcctaaaggaattataggttggatagatgaaccttctattgaactttcacagatagtaatgaaagaagctgatataatccttgcaacaggtggtccaggtatggttaaagcagcttattcttcaggtaaacctgctataggggttggtcctggtaacacacctgctttaattgatgaaagtgctgatattaaaatggcagtaaattcaatacttctttccaaaacttttgataatggtatgatttgtgcttcagagcagtcggtagtagttgtagattcaatatatgaagaagttaagaaagaatttgctcatagaggagcttatattttaagtaaggatgaaacaactaaagttggaaaaatactcttagttaatggtacattaaatgctggtatcgttggtcagagtgcttataaaatagcagaaatggcaggagttaaagttccagaagatgctaaagttcttataggagaagtaaaatcagtggagcattcagaagagccattttcacatgaaaagttatctccagttttagctatgtatagagctaaaaattttgatgaagctcttttaaaagctggaagattagttgaactcggtggaatgggtcatacatctgtattatatgtaaatgcaataactgaaaaagtaaaagtagaaaaatttagagaaactatgaagactggtagaacattaataaatatgccttcagcacaaggtgctataggagacatatataactttaaactagctccttcattaacattaggttgtggttcatggggaggaaactccgtatcagaaaatgttggacctaaacacttattaaatataaaaagtgttgctgagaggagagaaaatatgctttggtttagagttcctgaaaaggtttattttaaatatggtagtcttggagttgcattaaaagaattagatattttggataagaaaaaagtatttatagtaacagataaagttctttatcaattaggttatatagatagagttacaaagattcttgaagaattgaaaatttcatataaaatatttacagatgtagaaccagatccaaccctagctacagctaaaaaaggtgcagaagaattgttatcatttaatccagatactattatagcagttggtggtggttcagcaatggatgctgctaagattatgtgggtaatgtatgaacatccggaagtaagatttgaagatttagctatgagatttatggatataagaaagagagtatatacttttcctaagatgggtgaaaaagcaatgatgatttctgttgcaacatcagcaggaacaggatcagaagtaacaccttttgcagtaattactgatgaaaaaacaggagctaaatatccattagctgattatgaattaactccaaatatggctataattgatgctgaacttatgatgggtatgccaaaaggattaacagcagcttcaggaatagatgcactaactcatgcaatagaagcttatgtatcaataatggcttcagaatatactaatggattagcgttagaagcaataagattgatatttaagtatttaccaatagcttacagtgaaggaacaacaagtataaaggcaagagaaaaaatggcgcatgcttcaacaatagctggtatggcatttgctaatgcatttttaggagtatgtcattcaatggcacataaattaggatcaactcatcacgtaccacatggcattgccaatgcactacttataaatgaagttataaaatttaatgcagtagaaaatccaagaaaacaagctgcatttccacaatataagtatccaaatataaaaaagagatatgctagaatagcagattaccttaacttaggtgggtcaacagacgatgaaaaagtacaattattaataaatgctatagatgaattaaaagctaagataaatattccagaaagtattaaagaagcaggagtaacagaagaaaaattttatgctactttagataaaatgtcagaattagcttttgatgatcaatgtacaggtgcaaaccctagatatccattaataagtgaaataaaacaaatgtatgtaaatgcattttaa

SEQ ID NO: 140 - protein, 859 aa, Unknown
  Clostridium carboxidivorans Sequence
MKVTNVEELMKKMQEVQNAQKKFGSFTQEQVDEIFRQAALAANSARIDLAKMAVEETKMGIVEDKVIKNHFVAEYIYNKYKNEKTCGILEEDEGFGMVKIAEPVGVIAAVIPTTNPTSTAIFKALLALKTRNGIIFSPHPRAKKCTIAAAKLVLDAAVKAGAPKGIIGWIDEPSIELSQIVMKEADIILATGGPGMVKAAYSSGKPAIGVGPGNTPALIDESADIKMAVNSILLSKTFDNGMICASEQSVVVVDSIYEEVKKEFAHRGAYILSKDETTKVGKILLVNGTLNAGIVGQSAYKIAEMAGVKVPEDAKVLIGEVKSVEHSEEPFSHEKLSPVLAMYRAKNFDEALLKAGRLVELGGMGHTSVLYVNAITEKVKVEKFRETMKTGRTLINMPSAQGAIGDIYNFKLAPSLTLGCGSWGGNSVSENVGPKHLLNIKSVAERRENMLWFRVPEKVYFKYGSLGVALKELDILDKKKVFIVTDKVLYQLGYIDRVTKILEELKISYKIFTDVEPDPTLATAKKGAEELLSFNPDTIIAVGGGSAMDAAKIMWVMYEHPEVRFEDLAMRFMDIRKRVYTFPKMGEKAMMISVATSAGTGSEVTPFAVITDEKTGAKYPLADYELTPNMAIIDAELMMGMPKGLTAASGIDALTHAIEAYVSIMASEYTNGLALEAIRLIFKYLPIAYSEGTTSIKAREKMAHASTIAGMAFANAFLGVCHSMAHKLGSTHHVPHGIANALLINEVIKFNAVENPRKQAAFPQYKYPNIKKRYARIADYLNLGGSTDDEKVQLLINAIDELKAKINIPESIKEAGVTEEKFYATLDKMSELAFDDQCTGANPRYPLISEIKQMYVNAF

SEQ ID NO: 141 - DNA, 1401 bp, Escherichia coli
atgccacattcctacgattacgatgccatagtaataggttccggccccggcggcgaaggcgctgcaatgggcctggttaagcaaggtgcgcgcgtcgcagttatcgagcgttatcaaaatgttggcggcggttgcacccactggggcaccatcccgtcgaaagctctccgtcacgccgtcagccgcattatagaattcaatcaaaacccactttacagcgaccattcccgactgctccgctcttcttttgccgatatccttaaccatgccgataacgtgattaatcaacaaacgcgcatgcgtcagggattttacgaacgtaatcactgtgaaatattgcagggaaacgctcgctttgttgacgagcatacgttggcgctggattgcccggacggcagcgttgaaacactaaccgctgaaaaatttgttattgcctgcggctctcgtccatatcatccaacagatgttgatttcacccatccacgcatttacgacagcgactcaattctcagcatgcaccacgaaccgcgccatgtacttatctatggtgctggagtgatcggctgtgaatatgcgtcgatcttccgcggtatggatgtaaaagtggatctgatcaacacccgcgatcgcctgctggcatttctcgatcaagagatgtcagattctctctcctatcacttctggaacagtggcgtagtgattcgtcacaacgaagagtacgagaagatcgaaggctgtgacgatggtgtgatcatgcatctgaagtcgggtaaaaaactgaaagctgactgcctgctctatgccaacggtcgcaccggtaataccgattcgctggcgttacagaacattgggctagaaactgacagccgcggacagctgaaggtcaacagcatgtatcagaccgcacagccacacgtttacgcggtgggcgacgtgattggttatccgagcctggcgtcggcggcctatgaccaggggcgcattgccgcgcaggcgctggtaaaaggcgaagccaccgcacatctgattgaagatatccctaccggtatttacaccatcccggaaatcagctctgtgggcaaaaccgaacagcagctgaccgcaatgaaagtgccatatgaagtgggccgcgcccagtttaaacatctggcacgcgcacaaatcgtcggcatgaacgtgggcacgctgaaaattttgttccatcgggaaacaaaagagattctgggtattcactgctttggcgagcgcgctgccgaaattattcatatcggtcaggcgattatggaacagaaaggtggcggcaacactattgagtacttcgtcaacaccacctttaactacccgacgatggcggaagcctatcgggtagctgcgttaaacggtttaaaccgcctgttttaa

SEQ ID NO: 142 - protein, 466 aa, Escherichia coli
MPHSYDYDAIVIGSGPGGEGAAMGLVKQGARVAVIERYQNVGGGCTHWGTIPSKALRHAVSRIIEFNQNPLYSDHSRLLRSSFADILNHADNVINQQTRMRQGFYERNHCEILQGNARFVDEHTLALDCPDGSVETLTAEKFVIACGSRPYHPTDVDFTHPRIYDSDSILSMHHEPRHVLIYGAGVIGCEYASIFRGMDVKVDLINTRDRLLAFLDQEMSDSLSYHFWNSGVVIRHNEEYEKIEGCDDGVIMHLKSGKKLKADCLLYANGRTGNTDSLALQNIGLETDSRGQLKVNSMYQTAQPHVYAVGDVIGYPSLASAAYDQGRIAAQALVKGEATAHLIEDIPTGIYTIPEISSVGKTEQQLTAMKVPYEVGRAQFKHLARAQIVGMNVGTLKILFHRETKEILGIHCFGERAAEIIHIGQAIMEQKGGGNTIEYFVNTTFNYPTMAEAYRVAALNGLNRLF

SEQ ID NO: 143 - DNA, 1323 bp, Escherichia coli
atgcaagcctattttgaccagctcgatcgcgttcgttatgaaggctcaaaatcctcaaacccgttagcattccgtcactacaatcccgacgaactggtgttgggtaagcgtatggaagagcacttgcgttttgccgcctgctactggcacaccttctgctggaacggggcggatatgtttggtgtgggggcgtttaatcgtccgtggcagcagcctggtgaggcactggcgttggcgaagcgtaaagcagatgtcgcatttgagtttttccacaagttacatgtgccattttattgcttccacgatgtggatgtttcccctgagggcgcgtcgttaaaagagtacatcaataattttgcgcaaatggttgatgtcctggcaggcaagcaagaagagagcggcgtgaagctgctgtggggaacggccaactgctttacaaaccctcgctacggcgcgggtgcggcgacgaacccagatcctgaagtcttcagctgggcggcaacgcaagttgttacagcgatggaagcaacccataaattgggcggtgaaaactatgtcctgtggggcggtcgtgaaggttacgaaacgctgttaaataccgacttgcgtcaggagcgtgaacaactgggccgctttatgcagatggtggttgagcataaacataaaatcggtttccagggcacgttgcttatcgaaccgaaaccgcaagaaccgaccaaacatcaatatgattacgatgccgcgacggtctatggcttcctgaaacagtttggtctggaaaaagagattaaactgaacattgaagctaaccacgcgacgctggcaggtcactctttccatcatgaaatagccaccgccattgcgcttggcctgttcggttctgtcgacgccaaccgtggcgatgcgcaactgggctgggacaccgaccagttcccgaacagtgtggaagagaatgcgctggtgatgtatgaaattctcaaagcaggcggtttcaccaccggtggtctgaacttcgatgccaaagtacgtcgtcaaagtactgataaatatgatctgttttacggtcatatcggcgcgatggatacgatggcactggcgctgaaaattgcagcgcgcatgattgaagatggcgagctggataaacgcatcgcgcagcgttattccggctggaatagcgaattgggccagcaaatcctgaaaggccaaatgtcactggcagatttagccaaatatgctcaggaacatcatttgtctccggtgcatcagagtggtcgccaggaacaactggaaaatctggtaaaccattatctgttcgacaaataa

SEQ ID NO: 144 - protein, 440 aa, Escherichia coli
MQAYFDQLDRVRYEGSKSSNPLAFRHYNPDELVLGKRMEEHLRFAACYWHTFCWNGADMFGVGAFNRPWQQPGEALALAKRKADVAFEFFHKLHVPFYCFHDVDVSPEGASLKEYINNFAQMVDVLAGKQEESGVKLLWGTANCFTNPRYGAGAATNPDPEVFSWAATQVVTAMEATHKLGGENYVLWGGREGYETLLNTDLRQEREQLGRFMQMVVEHKHKIGFQGTLLIEPKPQEPTKHQYDYDAATVYGFLKQFGLEKEIKLNIEANHATLAGHSFHHEIATAIALGLFGSVDANRGDAQLGWDTDQFPNSVEENALVMYEILKAGGFTTGGLNFDAKVRRQSTDKYDLFYGHIGAMDTMALALKIAARMIEDGELDKRIAQRYSGWNSELGQQILKGQMSLADLAKYAQEHHLSPVHQSGRQEQLENLVNHYLFDK

SEQ ID NO: 145 - DNA, 1455 bp, Escherichia coli
atgtatatcgggatagatcttggcacctcgggcgtaaaagttattttgctcaacgagcagggtgaggtggttgctgcgcaaacggaaaagctgaccgtttcgcgcccgcatccactctggtcggaacaagacccggaacagtggtggcaggcaactgatcgcgcaatgaaagctctgggcgatcagcattctctgcaggacgttaaagcattgggtattgccggccagatgcacggagcaaccttgctggatgctcagcaacgggtgttacgccctgccattttgtggaacgacgggcgctgtgcgcaagagtgcactttgctggaagcgcgagttccgcaatcgcgggtgattaccggcaacctgatgatgcccggatttactgcgcctaaattgctatgggttcagcggcatgagccggagatattccgtcaaatcgacaaagtattattaccgaaagattacttgcgtctgcgtatgacgggggagtttgccagcgatatgtctgacgcagctggcaccatgtggctggatgtcgcaaagcgtgactggagtgacgtcatgctgcaggcttgcgacttatctcgtgaccagatgcccgcattatacgaaggcagcgaaattactggtgctttgttacctgaagttgcgaaagcgtggggtatggcgacggtgccagttgtcgcaggcggtggcgacaatgcagctggtgcagttggtgtgggaatggttgatgctaatcaggcaatgttatcgctggggacgtcgggggtctattttgctgtcagcgaagggttcttaagcaagccagaaagcgccgtacatagcttttgccatgcgctaccgcaacgttggcatttaatgtctgtgatgctgagtgcagcgtcgtgtctggattgggccgcgaaattaaccggcctgagcaatgtcccagctttaatcgctgcagctcaacaggctgatgaaagtgccgagccagtttggtttctgccttatctttccggcgagcgtacgccacacaataatccccaggcgaagggggttttctttggtttgactcatcaacatggccccaatgaactggcgcgagcagtgctggaaggcgtgggttatgcgctggcagatggcatggatgtcgtgcatgcctgcggtattaaaccgcaaagtgttacgttgattgggggcggggcgcgtagtgagtactggcgtcagatgctggcggatatcagcggtcagcagctcgattaccgtacggggggggatgtggggccagcactgggcgcagcaaggctggcgcagatcgcggcgaatccagagaaatcgctcattgaattgttgccgcaactaccgttagaacagtcgcatctaccagatgcgcagcgttatgccgcttatcagccacgacgagaaacgttccgtcgcctctatcagcaacttctgccattaatggcgtaa

SEQ ID NO: 146 - protein, 484 aa, Escherichia coli
MYIGIDLGTSGVKVILLNEQGEVVAAQTEKLTVSRPHPLWSEQDPEQWWQATDRAMKALGDQHSLQDVKALGIAGQMHGATLLDAQQRVLRPAILWNDGRCAQECTLLEARVPQSRVITGNLMMPGFTAPKLLWVQRHEPEIFRQIDKVLLPKDYLRLRMTGEFASDMSDAAGTMWLDVAKRDWSDVMLQACDLSRDQMPALYEGSEITGALLPEVAKAWGMATVPVVAGGGDNAAGAVGVGMVDANQAMLSLGTSGVYFAVSEGFLSKPESAVHSFCHALPQRWHLMSVMLSAASCLDWAAKLTGLSNVPALIAAAQQADESAEPVWFLPYLSGERTPHNNPQAKGVFFGLTHQHGPNELARAVLEGVGYALADGMDVVHACGIKPQSVTLIGGGARSEYWRQMLADISGQQLDYRTGGDVGPALGAARLAQIAANPEKSLIELLPQLPLEQSHLPDAQRYAAYQPRRETFRRLYQQLLPLMA

SEQ ID NO: 147 - DNA, 1992 bp, Escherichia coli
atgtcctcacgtaaagagcttgccaatgctattcgtgcgctgagcatggacgcagtacagaaagccaaatccggtcacccgggtgcccctatgggtatggctgacattgccgaagtcctgtggcgtgatttcctgaaacacaacccgcagaatccgtcctgggctgaccgtgaccgcttcgtgctgtccaacggccacggctccatgctgatctacagcctgctgcacctcaccggttacgatctgccgatggaagaactgaaaaacttccgtcagctgcactctaaaactccgggtcacccggaagtgggttacaccgctggtgtggaaaccaccaccggtccgctgggtcagggtattgccaacgcagtcggtatggcgattgcagaaaaaacgctggcggcgcagtttaaccgtccgggccacgacattgtcgaccactacacctacgccttcatgggcgacggctgcatgatggaaggcatctcccacgaagtttgctctctggcgggtacgctgaagctgggtaaactgattgcattctacgatgacaacggtatttctatcgatggtcacgttgaaggctggttcaccgacgacaccgcaatgcgtttcgaagcttacggctggcacgttattcgcgacatcgacggtcatgacgcggcatctatcaaacgcgcagtagaagaagcgcgcgcagtgactgacaaaccttccctgctgatgtgcaaaaccatcatcggtttcggttccccgaacaaagccggtacccacgactcccacggtgcgccgctgggcgacgctgaaattgccctgacccgcgaacaactgggctggaaatatgcgccgttcgaaatcccgtctgaaatctatgctcagtgggatgcgaaagaagcaggccaggcgaaagaatccgcatggaacgagaaattcgctgcttacgcgaaagcttatccgcaggaagccgctgaatttacccgccgtatgaaaggcgaaatgccgtctgacttcgacgctaaagcgaaagagttcatcgctaaactgcaggctaatccggcgaaaatcgccagccgtaaagcgtctcagaatgctatcgaagcgttcggtccgctgttgccggaattcctcggcggttctgctgacctggcgccgtctaacctgaccctgtggtctggttctaaagcaatcaacgaagatgctgcgggtaactacatccactacggtgttcgcgagttcggtatgaccgcgattgctaacggtatctccctgcacggtggcttcctgccgtacacctccaccttcctgatgttcgtggaatacgcacgtaacgccgtacgtatggctgcgctgatgaaacagcgtcaggtgatggtttacacccacgactccatcggtctgggcgaagacggcccgactcaccagccggttgagcaggtcgcttctctgcgcgtaaccccgaacatgtctacatggcgtccgtgtgaccaggttgaatccgcggtcgcgtggaaatacggtgttgagcgtcaggacggcccgaccgcactgatcctctcccgtcagaacctggcgcagcaggaacgaactgaagagcaactggcaaacatcgcgcgcggtggttatgtgctgaaagactgcgccggtcagccggaactgattttcatcgctaccggttcagaagttgaactggctgttgctgcctacgaaaaactgactgccgaaggcgtgaaagcgcgcgtggtgtccatgccgtctaccgacgcatttgacaagcaggatgctgcttaccgtgaatccgtactgccgaaagcggttactgcacgcgttgctgtagaagcgggtattgctgactactggtacaagtatgttggcctgaacggtgctatcgtcggtatgaccaccttcggtgaatctgctccggcagagctgctgtttgaagagttcggcttcactgttgataacgttgttgcgaaagcaaaagaactgctgtaa

SEQ ID NO: 148 - protein, 663 aa, Escherichia coli
MSSRKELANAIRALSMDAVQKAKSGHPGAPMGMADIAEVLWRDFLKHNPQNPSWADRDRFVLSNGHGSMLIYSLLHLTGYDLPMEELKNFRQLHSKTPGHPEVGYTAGVETTTGPLGQGIANAVGMAIAEKTLAAQFNRPGHDIVDHYTYAFMGDGCMMEGISHEVCSLAGTLKLGKLIAFYDDNGISIDGHVEGWFTDDTAMRFEAYGWHVIRDIDGHDAASIKRAVEEARAVTDKPSLLMCKTIIGFGSPNKAGTHDSHGAPLGDAEIALTREQLGWKYAPFEIPSEIYAQWDAKEAGQAKESAWNEKFAAYAKAYPQEAAEFTRRMKGEMPSDFDAKAKEFIAKLQANPAKIASRKASQNAIEAFGPLLPEFLGGSADLAPSNLTLWSGSKAINEDAAGNYIHYGVREFGMTAIANGISLHGGFLPYTSTFLMFVEYARNAVRMAALMKQRQVMVYTHDSIGLGEDGPTHQPVEQVASLRVTPNMSTWRPCDQVESAVAWKYGVERQDGPTALILSRQNLAQQERTEEQLANIARGGYVLKDCAGQPELIFIATGSEVELAVAAYEKLTAEGVKARVVSMPSTDAFDKQDAAYRESVLPKAVTARVAVEAGIADYWYKYVGLNGAIVGMTTFGESAPAELLFEEFGFTVDNVVAKAKELL

SEQ ID NO: 149 - DNA, 2004 bp, Escherichia coli
atgtcccgaaaagaccttgccaatgcgattcgcgcactcagtatggatgcggtacaaaaagccaactctggtcatcccggcgcgccgatgggcatggctgatattgccgaagtgctgtggaacgattttcttaaacataaccctaccgacccaacctggtatgatcgcgaccgctttattctttccaacggtcacgcgtcgatgctgctctacagtttgctacatctgaccggttacgacctgccgctggaagaactgaagaacttccgtcagttgcattcgaaaaccccaggccacccggagattggctatacgccaggcgttgaaaccaccaccggcccgcttggacaaggtttggcgaacgccgtcgggctggcgatagcagagcgtacactggcggcgcagtttaaccagccagaccatgagatcgtcgatcacttcacctatgtgtttatgggcgacggctgcctgatggaaggtatttcccacgaagtctgttcgctggcaggcacgctgggactgggcaagctgattggtttttacgatcacaacggtatttccatcgacggtgaaacagaaggctggtttaccgacgatacggcaaaacgttttgaagcctatcactggcatgtgatccatgaaatcgacggtcacgatccgcaggcggtgaaggaagcgatccttgaagcgcaaagcgtgaaagataagccgtcgctgattatctgccgtacggtgattggctttggttcgccgaataaagcaggtaaggaagaggcgcacggcgcaccactgggggaagaagaagtggcgctggcacggcaaaaactgggctggcaccatccgccatttgagatccctaaagagatttatcacgcctgggatgcccgtgaaaaaggcgaaaaagcgcagcagagctggaatgagaagtttgccgcctataaaaaggctcatccgcaactggcagaagagtttacccgacggatgagcggtggtttaccgaaggactgggagaaaacgactcagaaatatatcaatgagttacaggcaaatccggcgaaaatcgctacccgtaaggcttcgcaaaatacgcttaacgcttacgggccgatgctgcctgagttgctcggcggttcggcggatctggctcccagcaacctgaccatctggaaaggttctgtttcgctgaaggaagatccagcgggcaactacattcactacggggtgcgtgaatttggcatgaccgctatcgccaacggcatcgcgcaccacggcggctttgtgccgtataccgcgacgttcctgatgtttgttgaatacgcccgtaacgccgcgcggatggcggcactgatgaaagcgcggcagattatggtttatacccacgactcaattggcctgggcgaagatggtccgacgcaccaggctgttgagcaactggccagcctgcgcttaacgccaaatttcagcacctggcgaccgtgcgatcaggtggaagcggcggtgggctggaagctggcggttgagcgccacaacggaccgacggcactgatcctctcaaggcagaatctggcccaggtggaacgtacgccggatcaggttaaagagattgctcgtggcggttatgtgctgaaagacagcggcggtaagccagatattattctgattgccaccggttcagagatggaaattaccctgcaagcggcagagaaattagcaggagaaggtcgcaatgtacgcgtagtttccctgccctcgaccgatattttcgacgcccaggatgaggaatatcgggagtcggtgttgccttctaacgttgcggctcgcgtggcggtggaagcaggtattgccgattactggtacaagtatgttggtctgaaaggggcaattgtcgggatgacgggttacggggaatctgctccggcggataagctgttcccgttctttggctttaccgccgagaatattgtggcaaaagcgcataaggtgctgggagtgaaaggtgcctga

SEQ ID NO: 150 - protein, 667 aa, Escherichia coli
MSRKDLANAIRALSMDAVQKANSGHPGAPMGMADIAEVLWNDFLKHNPTDPTWYDRDRFILSNGHASMLLYSLLHLTGYDLPLEELKNFRQLHSKTPGHPEIGYTPGVETTTGPLGQGLANAVGLAIAERTLAAQFNQPDHEIVDHFTYVFMGDGCLMEGISHEVCSLAGTLGLGKLIGFYDHNGISIDGETEGWFTDDTAKRFEAYHWHVIHEIDGHDPQAVKEAILEAQSVKDKPSLIICRTVIGFGSPNKAGKEEAHGAPLGEEEVALARQKLGWHHPPFEIPKEIYHAWDAREKGEKAQQSWNEKFAAYKKAHPQLAEEFTRRMSGGLPKDWEKTTQKYINELQANPAKIATRKASQNTLNAYGPMLPELLGGSADLAPSNLTIWKGSVSLKEDPAGNYIHYGVREFGMTAIANGIAHHGGFVPYTATFLMFVEYARNAARMAALMKARQIMVYTHDSIGLGEDGPTHQAVEQLASLRLTPNFSTWRPCDQVEAAVGWKLAVERHNGPTALILSRQNLAQVERTPDQVKEIARGGYVLKDSGGKPDIILIATGSEMEITLQAAEKLAGEGRNVRVVSLPSTDIFDAQDEEYRESVLPSNVAARVAVEAGIADYWYKYVGLKGAIVGMTGYGESAPADKLFPFFGFTAENIVAKAHKVLGVKGA

SEQ ID NO: 151 - DNA, 951 bp, Escherichia coli
atgaacgagttagacggcatcaaacagttcaccactgtcgtggcagacagcggcgatattgagtccattcgccattatcatccccaggatgccaccaccaatccttcgctgttactcaaagctgccggattatcacaatatgagcatttaatagacgatgctatcgcctggggtaaaaaaaatggcaagacccaggaacaacaggtggtcgcagcgtgtgacaaactggcggtcaatttcggtgctgaaatcctcaaaatcgtacccggtcgcgtgtcaacagaagttgatgcacgcctctcttttgataaagaaaagagtattgagaaggcgcgccatctggtggacttgtatcagcaacaaggcgttgagaaatcacgcattctgatcaagctggcttcgacctgggaaggaattcgcgcggcagaagagctggaaaaagaaggtattaactgcaacctgacgctgctgttttcttttgcacaggcacgggcctgtgcggaagcaggcgtttttctgatttcgccgtttgtcgggcgtatttatgactggtatcaggcacgcaagccgatggacccgtatgtggtggaagaagatccgggcgttaaatcggtgcgcaatatctacgactactataagcaacaccactatgaaaccattgtgatgggcgcgagcttccgtcgcaccgaacaaatcctcgccttaaccggctgcgatcgactgactatcgcaccgaatttactgaaggagctgcaggaaaaagtttcgccagtggtacgtaaattaatcccaccttctcagacgttcccacgcccagctcccatgagcgaagcggagttccgttgggagcacaatcaggatgcgatggcggtagaaaaactgtctgaaggcattcgtctgttcgccgttgatcaacgcaaactggaagatcttcttgccgccaaactataa

SEQ ID NO: 152 - protein, 316 aa, Escherichia coli
MNELDGIKQFTTVVADSGDIESIRHYHPQDATTNPSLLLKAAGLSQYEHLIDDAIAWGKKNGKTQEQQVVAACDKLAVNFGAEILKIVPGRVSTEVDARLSFDKEKSIEKARHLVDLYQQQGVEKSRILIKLASTWEGIRAAEELEKEGINCNLTLLFSFAQARACAEAGVFLISPFVGRIYDWYQARKPMDPYVVEEDPGVKSVRNIYDYYKQHHYETIVMGASFRRTEQILALTGCDRLTIAPNLLKELQEKVSPVVRKLIPPSQTFPRPAPMSEAEFRWEHNQDAMAVEKLSEGIRLFAVDQRKLEDLLAAKL

SEQ ID NO: 153 - DNA, 954 bp, Escherichia coli
atgacggacaaattgacctcccttcgtcagtacaccaccgtagtggccgacactggggacatcgcggcaatgaagctgtatcaaccgcaggatgccacaaccaacccttctctcattcttaacgcagcgcagattccggaataccgtaagttgattgatgatgctgtcgcctgggcgaaacagcagagcaacgatcgcgcgcagcagatcgtggacgcgaccgacaaactggcagtaaatattggtctggaaatcctgaaactggttccgggccgtatctcaactgaagttgatgcgcgtctttcctatgacaccgaagcgtcaattgcgaaagcaaaacgcctgatcaaactctacaacgatgctggtattagcaacgatcgtattctgatcaaactggcttctacctggcagggtatccgtgctgcagaacagctggaaaaagaaggcatcaactgtaacctgaccctgctgttctccttcgctcaggctcgtgcttgtgcggaagcgggcgtgttcctgatctcgccgtttgttggccgtattcttgactggtacaaagcgaataccgataagaaagagtacgctccggcagaagatccgggcgtggtttctgtatctgaaatctaccagtactacaaagagcacggttatgaaaccgtggttatgggcgcaagcttccgtaacatcggcgaaattctggaactggcaggctgcgaccgtctgaccatcgcaccggcactgctgaaagagctggcggagagcgaaggggctatcgaacgtaaactgtcttacaccggcgaagtgaaagcgcgtccggcgcgtatcactgagtccgagttcctgtggcagcacaaccaggatccaatggcagtagataaactggcggaaggtatccgtaagtttgctattgaccaggaaaaactggaaaaaatgatcggcgatctgctgtaa

SEQ ID NO: 154 - protein, 317 aa, Escherichia coli
MTDKLTSLRQYTTVVADTGDIAAMKLYQPQDATTNPSLILNAAQIPEYRKLIDDAVAWAKQQSNDRAQQIVDATDKLAVNIGLEILKLVPGRISTEVDARLSYDTEASIAKAKRLIKLYNDAGISNDRILIKLASTWQGIRAAEQLEKEGINCNLTLLFSFAQARACAEAGVFLISPFVGRILDWYKANTDKKEYAPAEDPGVVSVSEIYQYYKEHGYETVVMGASFRNIGEILELAGCDRLTIAPALLKELAESEGAIERKLSYTGEVKARPARITESEFLWQHNQDPMAVDKLAEGIRKFAIDQEKLEKMIGDLL

SEQ ID NO: 155 - DNA, 954 bp, Escherichia coli; identical to SEQ ID NO: 153

SEQ ID NO: 156 - protein, 317 aa, Escherichia coli; identical to SEQ ID NO: 154

SEQ ID NO: 157 - DNA, 678 bp, Escherichia coli
atgaaacagtatttgattgccccctcaattctgtcggctgattttgcccgcctgggtgaagataccgcaaaagccctggcagctggcgctgatgtcgtgcattttgacgtcatggataaccactatgttcccaatctgacgattgggccaatggtgctgaaatccttgcgtaactatggcattaccgcccctatcgacgtacacctgatggtgaaacccgtcgatcgcattgtgcctgatttcgctgccgctggtgccagcatcattacctttcatccagaagcctccgagcatgttgaccgcacgctgcaactgattaaagaaaatggctgtaaagcgggtctggtatttaacccggcgacacctctgagctatctggattacgtgatggataagctggatgtgatcctgctgatgtccgtcaaccctggtttcggcggtcagtctttcattcctcaaacactggataaactgcgcgaagtacgtcgccgtatcgacgagtctggctttgacattcgactagaagtggacggtggcgtgaaggtgaacaacattggcgaaatcgctgcggcgggcgcggatatgttcgtcgccggttcggcaatcttcgaccagccagactacaaaaaagtcattgatgaaatgcgcagtgaactggcaaaggtaagtcatgaataa

SEQ ID NO: 158 - protein, 225 aa, Escherichia coli
MKQYLIAPSILSADFARLGEDTAKALAAGADVVHFDVMDNHYVPNLTIGPMVLKSLRNYGITAPIDVHLMVKPVDRIVPDFAAAGASIITFHPEASEHVDRTLQLIKENGCKAGLVFNPATPLSYLDYVMDKLDVILLMSVNPGFGGQSFIPQTLDKLREVRRRIDESGFDIRLEVDGGVKVNNIGEIAAAGADMFVAGSAIFDQPDYKKVIDEMRSELAKVSHE

SEQ ID NO: 159 - DNA, 1416 bp, Escherichia coli
gtgaaacaaagcactattgcactggcactcttaccgttactgtttacccctgtgacaaaagcccggacaccagaaatgcctgttctggaaaaccgggctgctcagggcgatattactgcacccggcggtgctcgccgtttaacgggtgatcagactgccgctctgcgtgattctcttagcgataaacctgcaaaaaatattattttgctgattggcgatgggatgggggactcggaaattactgccgcacgtaattatgccgaaggtgcgggcggcttttttaaaggtatagatgccttaccgcttaccgggcaatacactcactatgcgctgaataaaaaaaccggcaaaccggactacgtcaccgactcggctgcatcagcaaccgcctggtcaaccggtgtcaaaacctataacggcgcgctgggcgtcgatattcacgaaaaagatcacccaacgattctggaaatggcaaaagccgcaggtctggcgaccggtaacgtttctaccgcagagttgcaggatgccacgcccgctgcgctggtggcacatgtgacctcgcgcaaatgctacggtccgagcgcgaccagtgaaaaatgtccgggtaacgctctggaaaaaggcggaaaaggatcgattaccgaacagctgcttaacgctcgtgccgacgttacgcttggcggcggcgcaaaaacctttgctgaaacggcaaccgctggtgaatggcagggaaaaacgctgcgtgaacaggcacaggcgcgtggttatcagttggtgagcgatgctgcctcactgaattcggtgacggaagcgaatcagcaaaaacccctgcttggcctgtttgctgacggcaatatgccagtgcgctggctaggaccgaaagcaacgtaccatggcaatatcgataagcccgcagtcacctgtacgccaaatccgcaacgtaatgacagtgtaccaaccctggcgcagatgaccgacaaagccattgaattgttgagtaaaaatgagaaaggctttttcctgcaagttgaaggtgcgtcaatcgataaacaggatcatgctgcgaatccttgtgggcaaattggcgagacggtcgatctcgatgaagccgtacaacgggcgctggaattcgctaaaaaggagggtaacacgctggtcatagtcaccgctgatcacgcccacgccagccagattgttgcgccggataccaaagctccgggcctcacccaggcgctaaataccaaagatggcgcagtgatggtgatgagttacgggaactccgaagaggattcacaagaacataccggcagtcagttgcgtattgcggcgtatggcccgcatgccgccaatgttgttggactgaccgaccagaccgatctcttctacaccatgaaagccgctctggggctgaaataa

SEQ ID NO: 160 - protein, 471 aa, Escherichia coli
MKQSTIALALLPLLFTPVTKARTPEMPVLENRAAQGDITAPGGARRLTGDQTAALRDSLSDKPAKNIILLIGDGMGDSEITAARNYAEGAGGFFKGIDALPLTGQYTHYALNKKTGKPDYVTDSAASATAWSTGVKTYNGALGVDIHEKDHPTILEMAKAAGLATGNVSTAELQDATPAALVAHVTSRKCYGPSATSEKCPGNALEKGGKGSITEQLLNARADVTLGGGAKTFAETATAGEWQGKTLREQAQARGYQLVSDAASLNSVTEANQQKPLLGLFADGNMPVRWLGPKATYHGNIDKPAVTCTPNPQRNDSVPTLAQMTDKAIELLSKNEKGFFLQVEGASIDKQDHAANPCGQIGETVDLDEAVQRALEFAKKEGNTLVIVTADHAHASQIVAPDTKAPGLTQALNTKDGAVMVMSYGNSEEDSQEHTGSQLRIAAYGPHAANVVGLTDQTDLFYTMKAALGLK

SEQ ID NO: 161 - DNA, 1858 bp, Arabidopsis thaliana
cacgtggcgaagaatagtccccgaatcttcctctgacgaccatttgatacttttttttcttcagtttgttggttttgtcctcttaacaaaatattcttcaaactctctctgttgtttgtttgttgacaaatctctcaaaaccatttgttttgcaatcgcagatccgtttttcttcgggtctcatcacaatgaatggcttctctgatcttaatccttctgagaggtacgctttgtctgatcatcaatgatgcttataataatctcatttatacatgatcttgcctctatatatttgttcatcttagtaatcttcggtctcagcttccattttcgtctcccactatgtttctaggattttgtgttacttttgttagaaaactgcgatttttgtgctagtgtttgtttctccaagatcaatggaactcgttgcctaaaattcctgattatagttacataaacatcaaatggttctaattggtctttgatcttaaacccatttgattatggtatctaaagtttgatccttttgatgcactctcatcgcagtttctcgtgattttaatattattgaactcttttgatttgtggtgaagcaaaccttctctgtcacaactagctccattagaagccattctgtttgatgttgatggaacactctgtgactcagatcccatccaccttattgccttccaagaactgcttcaagaggttccttgctttttttaatgtcattataacttccaaatttacaacaagactttagaaaactgtgaataatatgctatggaaccttgctattactcagtttcaagctctcgtgtcaatcaattttgtttctttctatcattcgcagattggttttaacaatggtgtcccaatcgatgagaaattctttgttgagaacattgctggaaaacacaattctgaaattgctctacttctgttccctgatgatgtttcaagagggttaaaattctgtgatgaaaaggaagctctttaccgcaagtaagctatttttctgtgtttcctccattcttttaatgtcacaaactcttttcaggtctgagttcatttggagtaactttgttttgttcttttttcttgatgattagaattgttgcagagaagataaagccacttgatgggcttataaaactgaccaaatggatcgaagatcgtggattgaaacgagctgcggtaacaaacgctccaaaagaaaacgcagagctcatgatatcgaaacttggtctgactgatttctttcaagcagtgattcttggctctgaatgtgaatttcccaaaccacaccctggaccttacttgaaggctcttgaagtgcttaacgtgtcaaaggagcacacgctagttttcgaagactcgatctctgggataaaagctggagttgcagctggaatgccagtgattggactgactacagggaatccagcaagcctgcttatgcaagcaaaacccgcttttctcatcgagaactatgcggatccaaaactgtgggctgtgttggaagaacttgataacaagtcttaagtctcacttgtttggcttatggaaacccacacatgcatgagcagcctctgaagtttaccttatgtcttagatgatcattgttgaataattcattgggagtttatgacaatgggagctttcaaatatctgattattttgtattgatacatgcacaatgctagatttgtatccaggagatagttgcataaaccaatatactataccctcggatcttagcttattttcattgatatcttgttgttttgtgctgtaaacatatcagcttttgaatacatttggtccatggcgcaaaataagactttttttttttttt

SEQ ID NO: 162 - protein, 244 aa, Arabidopsis thaliana
MNGFSDLNPSESKPSLSQLAPLEAILFDVDGTLCDSDPIHLIAFQELLQEIGFNNGVPIDEKFFVENIAGKHNSEIALLLFPDDVSRGLKFCDEKEALYRKIVAEKIKPLDGLIKLTKWIEDRGLKRAAVTNAPKENAELMISKLGLTDFFQAVILGSECEFPKPHPGPYLKALEVLNVSKEHTLVFEDSISGIKAGVAAGMPVIGLTTGNPASLLMQAKPAFLIENYADPKLWAVLEELDNKS

SEQ ID NO: 163 - DNA, 819 bp, Bacillus subtilis
atgcgtattatggccagtcatgatacgcctgtgtcaccggctggcattctgattgacttggacggtactgtattcagaggaaatgagttgatcgaaggagcaagagaagcgatcaaaacgcttaggagaatgggaaagaaaatcgtctttttaagcaaccgggggaatatctcccgtgccatgtgcagaaaaaaacttcttggcgcggggattgaaacggacgtaaacgacattgttctgtcatcaagcgtgacagcggcttttctgaaaaaacattatcgtttttcaaaggtatgggtgcttggggagcaaggcttggttgacgagctgaggctggccggtgtgcagaacgcgagcgaaccgaaggaagcggattggctcgtgatctcccttcatgaaacgctcacgtacgacgatttaaatcaagcctttcaagcggctgccggcggcgctcgtattatcgctacaaacaaagaccgctcttttccgaacgaagacggaaatgccattgatgtggccggaatgatcggggcaattgagacttctgcacaagcgaagactgaacttgttgtcggaaaaccgtcatggctgatggcggaggctgcctgtacagcaatggggctgtccgcacatgaatgcatgattataggagacagcattgaatctgacattgcgatggggaagctttatggcatgaaaagcgccttagtgctaactggttctgcgaaacagggtgaacagcgtttgtacacgccggattatgtgctggattctattaaggatgtaaccaaattggctgaggaggggattctgatatga

SEQ ID NO: 164 - protein, 272 aa, Bacillus subtilis
MRIMASHDTPVSPAGILIDLDGTVFRGNELIEGAREAIKTLRRMGKKIVFLSNRGNISRAMCRKKLLGAGIETDVNDIVLSSSVTAAFLKKHYRFSKVWVLGEQGLVDELRLAGVQNASEPKEADWLVISLHETLTYDDLNQAFQAAAGGARIIATNKDRSFPNEDGNAIDVAGMIGAIETSAQAKTELVVGKPSWLMAEAACTAMGLSAHECMIIGDSIESDIAMGKLYGMKSALVLTGSAKQGEQRLYTPDYVLDSIKDVTKLAEEGILI

SEQ ID NO: 165 - DNA, 825 bp, Pseudomonas fluorescens
atgagtgacgcagcgattcatcccatccgttttatcctcagtgacgtggacggcaccttgctgcatcccgatcatagcctcagccaacgcaccgccgacgcggtgcgcgccttgcgcgaagccggagtgttgttcagcctggccagcgggcgcccgcccaaggccatgctgcacctgatcgaaacctttgggatcgatgtgccggtggcgggcttcaatggcggtaccttgatcaacccggatggcagcatcctggttgcccatcatctgccggcggaagcggcgctggttaccctggcgctgttttcagcggagccggaggtggaagtgtgggtgtttgccgatggcgactggctgcgccgtgacccgtcagggccgatggagccgcgcgaggcgaatggcctgggctatgggccggtggtggtggagagtttcgagccctacctggaccgggtcgacaagatcgtcgccgcgagtcacaacacgcaattattggtagagctggaggcgcgattgcaacccaaggtgcaggggctggcccaggtgtcgcgttcgcaaccggtgtacttggacgtgaccgcgatgctggccaacaagggcgaggccttgaagaccttggcggcacacctgggtgtgcccatggagcaaacggcggcgattggcgatggtggcaatgacccggcgatgtttcaggtggccgggttgtcgattgccatggggcaggcggaagaaaccgtcaagcgccaggccagtgtggtgacgggcagcaacatcgaagatggcgccgccgaagcaatcgaacggtttattctcgcggcaccttaa

SEQ ID NO: 166 - protein, 274 aa, Pseudomonas fluorescens
MSDAAIHPIRFILSDVDGTLLHPDHSLSQRTADAVRALREAGVLFSLASGRPPKAMLHLIETFGIDVPVAGFNGGTLINPDGSILVAHHLPAEAALVTLALFSAEPEVEVWVFADGDWLRRDPSGPMEPREANGLGYGPVVVESFEPYLDRVDKIVAASHNTQLLVELEARLQPKVQGLAQVSRSQPVYLDVTAMLANKGEALKTLAAHLGVPMEQTAAIGDGGNDPAMFQVAGLSIAMGQAEETVKRQASVVTGSNIEDGAAEAIERFILAAP

SEQ ID NO: 167 - DNA, 651 bp, Escherichia coli
gtgcggtgcaaaggttttctgtttgatcttgatggaacgctggtggattccctgcctgcggtagaacgggcgtggagcaactgggccagacgtcatgggttagcgccggaagaggtgctggctttcattcacggtaaacaggcgatcacctctctgcgccattttatggcgggcaaatccgaggctgatattgccgccgagtttacgcgtctggagcacatcgaggccacggaaaccgaaggtattaccgcgcttccgggggcaatcgccttactcagtcatttgaataaagcaggtattccgtgggccattgtgacttctggctccatgccggtagcgcgagcgcgccataaaatagctgggcttcccgcaccagaggtgtttgtaaccgctgagcgagtgaagcgcggaaaaccagaacctgatgcgtatctgttaggcgcgcagctgctggggcttgcgccgcaggagtgtgtggtggtggaagatgctcccgctggcgtgctttctggcctggcggcgggttgtcatgtcattgcggttaacgctccggcagataccccgcgcctgaatgaggtcgatttggtcctccacagtctggagcaaattactgtgaccaaacagccaaatggcgatgttattattcagtga

SEQ ID NO: 168 - protein, 216 aa, Escherichia coli
MRCKGFLFDLDGTLVDSLPAVERAWSNWARRHGLAPEEVLAFIHGKQAITSLRHFMAGKSEADIAAEFTRLEHIEATETEGITALPGAIALLSHLNKAGIPWAIVTSGSMPVARARHKIAGLPAPEVFVTAERVKRGKPEPDAYLLGAQLLGLAPQECVVVEDAPAGVLSGLAAGCHVIAVNAPADTPRLNEVDLVLHSLEQITVTKQPNGDVIIQ

SEQ ID NO: 169 - DNA, 816 bp, Escherichia coli
atgagcgtaaaagttatcgtcacagacatggacggtacttttcttaacgacgccaaaacgtacaaccaaccacgttttatggcgcaatatcaggaactgaaaaagcgcggcattaagttcgttgttgccagcggtaatcagtattaccagcttatttcattctttcctgagctaaaggatgagatctcttttgtcgcggaaaacggcgcactggtttacgaacatggcaagcagttgttccacggcgaactgacccgacatgaatcgcggattgttattggcgagttgctaaaagataagcaactcaattttgtcgcctgcggtctgcaaagtgcatatgtcagcgaaaatgcccccgaagcatttgtcgcactgatggcaaaacactaccatcgcctgaaacctgtaaaagattatcaggagattgacgacgtactgttcaagttttcgctcaacctgccggatgaacaaatcccgttagtgatcgacaaactgcacgtagcgctcgatggcattatgaaacccgttaccagtggttttggctttatcgacctgattattcccggtctacataaagcaaacggtatttcgcggttactgaaacgctgggatctgtcaccgcaaaatgtggtagcgattggcgacagcggtaacgatgcggagatgctgaaaatggcgcgttattcctttgcgatgggcaatgctgcggaaaacattaaacaaatcgcccgttacgctaccgatgataataatcatgaaggcgcgctgaatgtgattcaggcggtgctggataacacatccccttttaacagctga

SEQ ID NO: 170 - protein, 271 aa, Escherichia coli
MSVKVIVTDMDGTFLNDAKTYNQPRFMAQYQELKKRGIKFVVASGNQYYQLISFFPELKDEISFVAENGALVYEHGKQLFHGELTRHESRIVIGELLKDKQLNFVACGLQSAYVSENAPEAFVALMAKHYHRLKPVKDYQEIDDVLFKFSLNLPDEQIPLVIDKLHVALDGIMKPVTSGFGFIDLIIPGLHKANGISRLLKRWDLSPQNVVAIGDSGNDAEMLKMARYSFAMGNAAENIKQIARYATDDNNHEGALNVIQAVLDNTSPFNS

SEQ ID NO: 171 - DNA, 813 bp, Escherichia coli
atggctattaaactcattgctatcgatatggatggcacccttctgctgcccgatcacaccatttcacccgccgttaaaaatgcgattgccgcagctcgcgcccgtggcgtgaatgtcgtgctaacgacgggtcgcccgtatgcaggtgtgcacaactacctgaaagagctgcatatggaacagccgggcgactactgcattacttataacggcgcgctggtacagaaggccgctgatggtagcaccgtggcgcaaactgctctcagctatgacgactatcgtttcctggaaaaactctctcgcgaagtcggttctcatttccacgccctggaccgcaccacgctgtacaccgccaaccgtgatatcagctactacacggtgcatgaatccttcgttgccaccattccgctggtgttctgcgaagcggagaaaatggaccccaatacccagttcctgaaagtgatgatgattgatgaacccgccatcctcgaccaggctatcgcgcgtattccgcaggaagtgaaagagaaatataccgtgctgaaaagtgcgccgtacttcctcgaaatcctcgataaacgcgttaacaaaggtacgggggtgaaatcactggccgacgtgttaggtattaaaccggaagaaatcatggcgattggcgatcaggaaaacgatatcgcaatgattgaatatgcaggcgtcggtgtggcgatggataacgctattccttcagtgaaagaagtggcgaactttgtcaccaaatctaaccttgaagatggcgtggcgtttgctattgagaagtatgtgctgaattaa

SEQ ID NO: 172 - protein, 270 aa, Escherichia coli
MAIKLIAIDMDGTLLLPDHTISPAVKNAIAAARARGVNVVLTTGRPYAGVHNYLKELHMEQPGDYCITYNGALVQKAADGSTVAQTALSYDDYRFLEKLSREVGSHFHALDRTTLYTANRDISYYTVHESFVATIPLVFCEAEKMDPNTQFLKVMMIDEPAILDQAIARIPQEVKEKYTVLKSAPYFLEILDKRVNKGTGVKSLADVLGIKPEEIMAIGDQENDIAMIEYAGVGVAMDNAIPSVKEVANFVTKSNLEDGVAFAIEKYVLN

SEQ ID NO: 173 - DNA, 867 bp, Plasmodium falciparum
atgcacgaaattgtagataagaatggtaagaaagttcaaaagaataatttgaatgatgaaataaaaataatctttacggatttagatggaacattgttaaatagtgagaataaggtttcagaacagaatttggagagtttaataagagctcaagaaaaaggcataaaggttgttatagcaacaggtagatctatattttctgtagagaatgttataggagagcatgtaaaaaagaatagaataagtttattaccagggatatatatgaatggatgtgtaacatttgatgaaaaaggttcaagggtgatagataggattatgaacaatgacttgaaaatggagatacatgaattttctaaacaaataaatatatcaaaatatgctatatggttttgtttagaaaaaacatattgttttgaaataaatgattgtatacgtgaatatatggaggttgaagcattaaatcctgatgttattgaagataatatgttagaaggtttgacagtatataaagtattattttcattaccagaaaatatattagaaaatacgttaaaattatgtagagagaaattttctcatcgtattaatgtagctaatacttttcaaagttatgttgaattatttcatcaacatactaataaattcgaaggtgtaaaagaaatttgtaaatattataatataagtctaaacaatgcgctagctatgggagatggagaaaatgatattgaaatgttaagtggtttaacacattcagtgggtgtacataatgcttcagaaaaagtaaaaaattcagctgcttatgttggaccttcgaataatgaacatgctatatctcatgtcttgaagacattctgtgacatataa

SEQ ID NO: 174 - protein, 288 aa, Plasmodium falciparum
MHEIVDKNGKKVQKNNLNDEIKIIFTDLDGTLLNSENKVSEQNLESLIRAQEKGIKVVIATGRSIFSVENVIGEHVKKNRISLLPGIYMNGCVTFDEKGSRVIDRIMNNDLKMEIHEFSKQINISKYAIWFCLEKTYCFEINDCIREYMEVEALNPDVIEDNMLEGLTVYKVLFSLPENILENTLKLCREKFSHRINVANTFQSYVELFHQHTNKFEGVKEICKYYNISLNNALAMGDGENDIEMLSGLTHSVGVHNASEKVKNSAAYVGPSNNEHAISHVLKTFCDI

SEQ ID NO: 175 - DNA, 1059 bp, Enterococcus avium
atgagtaaaacaatgaagggtgtttccaagcaggcacccggttatgaccaaatggcatttatcgatttatctgttccagaagcaacagatgacaaggtcttgattaaagtcgcttatacaggtatttgcggatcagatatccatacgtttaaaggtgaatacaaaaatcccactactcccgtcgtcctaggacatgaattttctgggcaggtagttgaagtcggagccaatgtaccaaaggtcaaggttggtgatcgggtaaccagtgagacgaccttttatgtctgcggcgaatgcgattattgcaaggaaaagcagtataatttgtgtccccatcgaaaaggaatcggcacgcagcaaaatggctccatggcgaactatgtgttggctcgagaagaaagcattcatttactgccggatcatttaagctatgaaggtgcggcgatgagcgaaccattagcgtgctgtgtccacgcgatgtatcaaaagagtcacttggaattaaaagacacgatcattatcatgggccctggaccaatcggactgtatcttttgcagattgccaaggaaattggagccttcgtcattatgacggggatcacaaaagatgctcatcgcttagcattagcaaaaaaactaggcgcggatgtgatcgttgatacgatgaaggaagatctagcgaaagtcgtcaatgagatcacggatggctacggtgtcgataaagtgtatgatgcctcaggagcagttcctgctgttaatgctagtctgccattgattcgcaagcaggggcaatttattcaagtaggcttgttcgctaataaaatggtggatttagacactgaatcgatcattcaacgagagatcgaatacatcggcagtcgttcacagaacccttatgactggccgattgcgatccacttattagcgaaaggtgcgatcaatatcgatgagatgattacgaaaaaatacccgttgactgaatggcgggaagcctttgataaagtgatggaaggcaatgaaatcaaggtaatgatcgaatccaatccagaagaattttaa

SEQ ID NO: 176 - protein, 352 aa, Enterococcus avium
MSKTMKGVSKQAPGYDQMAFIDLSVPEATDDKVLIKVAYTGICGSDIHTFKGEYKNPTTPVVLGHEFSGQVVEVGANVPKVKVGDRVTSETTFYVCGECDYCKEKQYNLCPHRKGIGTQQNGSMANYVLAREESIHLLPDHLSYEGAAMSEPLACCVHAMYQKSHLELKDTIIIMGPGPIGLYLLQIAKEIGAFVIMTGITKDAHRLALAKKLGADVIVDTMKEDLAKVVNEITDGYGVDKVYDASGAVPAVNASLPLIRKQGQFIQVGLFANKMVDLDTESIIQREIEYIGSRSQNPYDWPIAIHLLAKGAINIDEMITKKYPLTEWREAFDKVMEGNEIKVMIESNPEEF

SEQ ID NO: 177 - DNA, 846 bp, Candida albicans
atggattccgcatactggtcatacgataacatagtcccaagcttccgtttggatggaaaactagtcatattaaccggtggctctggtggtttggctgccgtggtatcaagagctttattagccaaaggtgccgatgttgcattagtcgatatgaacttggaaagaacacaacaagctgctagagacgtcttacaatggggcgaagagcaaatgaaaggtaaatacgaatcaccaatcggtcaggtgagtgcttggtcatgtaatattggcgatgctgaagctgtcgacttgacattcaaagccatcaacgaacaccacggcaaaatctcaagtgtcttggtcaacactgccggttacgctgaaaacttcccagctgaagagtacccagccaagaacgctgaaaaccttatgaaagttaacgggttggggtcattctacgtttcccaagcttttgctagaccattaatccaaaacaacatgaccggatcgatcattttgatcgggtcaatgtccggtaccatcgtcaacgacccacaaccacaatgcatgtacaacatgtccaaagccggtgtcattcatttagccagatcattggcctgtgaatgggctaaatacaatatcagagtcaacacattgtcgccagggtacatcttaaccccattgacaagaaacgttattagtggacacaccgaaatgaagacagaatgggaatcaaagatcccaatgaagagaatggcagaaccaaaagagtttgttggttctatcttatacttggcctcagaatctgcttcatcatacactactggtcacaacttggtcgttgacgggggttacgagtgctggtaa

SEQ ID NO: 178 - protein, 281 aa, Candida albicans
MDSAYWSYDNIVPSFRLDGKLVILTGGSGGLAAVVSRALLAKGADVALVDMNLERTQQAARDVLQWGEEQMKGKYESPIGQVSAWSCNIGDAEAVDLTFKAINEHHGKISSVLVNTAGYAENFPAEEYPAKNAENLMKVNGLGSFYVSQAFARPLIQNNMTGSIILIGSMSGTIVNDPQPQCMYNMSKAGVIHLARSLACEWAKYNIRVNTLSPGYILTPLTRNVISGHTEMKTEWESKIPMKRMAEPKEFVGSILYLASESASSYTTGHNLVVDGGYECW

SEQ ID NO: 179 - DNA, 849 bp, Candida tropicalis
atggactcctcatcatactggtcatacgacaacattgttccaagttttagattggatggaaaattagtaattatcactggtggttctggtggtttgtccgctgttgtttccagagccttgttagcaaaaggtgctgatattgctttgattgatatgaacttggaaagaacccaacaagccgcaagagatgttttacaatggggtgaagaacaaatgaaaggaaaacacgaatctccaattggtcaagtcagtgcttggtcctgtaacattggtgatgctgaagctgttgaattgacattcaaagccatcaacgaacaccacggtaaagttgccagtgttttgattaacacagctggttatgctgaaaatttccctgctgaagaatacccagccaagaatgccgaaaatatcatgaaggtcaatggtttaggatccttttacgtctcacaagctttcgccagacctttgattcaaaataacatgactggctctattatcttgattggttctatgtctggtaccattgtcaacgatccacaaccacaatgtatgtacaacatgtccaaagctggtgtcattcacttggccagatctttagcatgtgaatgggccaaatacaacatcagagtcaataccttgtccccaggttatattttgactccattgacaagaaatgttattagtggtcacactgaaatgaagacagaatgggaatccaagattccaatgaagagaatggccgagccaaaagaatttgtcggttctattttgtacttggcttctgattctgcctcttcctacactactggtcacaatttggtagtggatggtggttacgaatgttggtaa

SEQ ID NO: 180 - protein, 282 aa, Candida tropicalis
MDSSSYWSYDNIVPSFRLDGKLVIITGGSGGLSAVVSRALLAKGADIALIDMNLERTQQAARDVLQWGEEQMKGKHESPIGQVSAWSCNIGDAEAVELTFKAINEHHGKVASVLINTAGYAENFPAEEYPAKNAENIMKVNGLGSFYVSQAFARPLIQNNMTGSIILIGSMSGTIVNDPQPQCMYNMSKAGVIHLARSLACEWAKYNIRVNTLSPGYILTPLTRNVISGHTEMKTEWESKIPMKRMAEPKEFVGSILYLASDSASSYTTGHNLVVDGGYECW

SEQ ID NO: 181 - DNA, 1158 bp, Unknown
  Scheffersomyces stipitis Sequence
aatttctatagattggtacaaatcatagaatagagaatcccaatagcacaagctcctgatttccttgcattatttgcccgcgctcaagtattttttagactgagtcttccatacttcgtactgatataaacaaatattgcacaaactactactagtgaattactaatagtttccaccaaatacagccactacacactacatatactacaatggactactcatacgctaacgttgttcccaacttcagattggacggaagattggctattattaccggaggttctggtggtttggccgcagtcatttcgcgtgccttgttggcccagggcgctgatgttgctctcattgacatgaacttggaaagaaccaagtccgctgccaaagaagttttgggctggggtgaagagacgttgaagggtgaacacgcttcagccatcggccaagtttccgcctggtcctgcaacattggggatgctgaggcagtagacgctactttcagctccatcaacgaacaccacggcaagatcgctgacttgttgattaacaccgctggatactgtgaaaacttccctgccgaaacgtacccggctactaacgctgaaagcatcatgaaggtgaacggtttgggctcattctacgtttcgcaatcgttcgctagaccattgatccagaacaacttgagaggctctatcatcttgattggctcaatgtctggaacaattgtcaacgacccacaaccccaatgtatgtacaacatgtccaaggctggagtgatccacttggtcagatcgttggcctgcgaatgggccaagtacaacatcagagtcaacaccttatcaccaggctatattttgactcctttaaccagaaacgtgatttctggccacacagagatgaaggaagcctgggaatccaagatccccatgaagagaatggccgaacccaaggaattcgtggggtccatcttatacttggcaagcgagactgcttcttcctacactacgggccacaatttggttgtggacggaggatatgaatgctggtagataccgctcccattttaatgaaacgaccacgatacgacccacagtttaatttcacaagtataaagtttatatgtcgctactgttttatagagaaagccaaaattgacgaaac

SEQ ID NO: 182 - protein, 278 aa, Unknown
  Scheffersomyces stipitis Sequence
MDYSYANVVPNFRLDGRLAIITGGSGGLAAVISRALLAQGADVALIDMNLERTKSAAKEVLGWGEETLKGEHASAIGQVSAWSCNIGDAEAVDATFSSINEHHGKIADLLINTAGYCENFPAETYPATNAESIMKVNGLGSFYVSQSFARPLIQNNLRGSIILIGSMSGTIVNDPQPQCMYNMSKAGVIHLVRSLACEWAKYNIRVNTLSPGYILTPLTRNVISGHTEMKEAWESKIPMKRMAEPKEFVGSILYLASETASSYTTGHNLVVDGGYECW

SEQ ID NO: 183 - DNA, 1482 bp, Pseudomonas fluorescens
atgaaactgaataagcagaacctcacccagctggcgcccgaagtgaaattgccagcctatacgcttgccgacacacgccagggcatcgcccatatcggcgtcggcggcttccatcgcgcgcaccaggcgtattacaccgatgcgctgatgaataccggcgagggcctggactggagcatctgcggcgttggcctgcgcagcgaggaccgcaaggcccgcgatgacctggccggccaggactacctgttcaccctgtacgaactgggcgacaccgacgacaccgaagtgcgcgtgatcggctcgatcagcgacatgctgctggccgaagacagcgcccaggcattgatcgataaactggccagccccgagattcgcatcgtctcgctgaccatcaccgaaggcggctactgcatcgacgacagcaacggcgaattcatggcccacttgccgcagatccagcacgacctggctcatccgtcgtcgccaaaaaccgtgttcggctttatctgcgcggcattgacccagcgccgcgcggccggcatcccggcgtttaccgtgatgtcctgcgataacctgccccacaatggcgctgtcacgcgcaaggcactgctggcgttcgccgccctgcacaacgccgagctgcatgactggatcaaggcccatgtgagcttcccgaacgccatggtcgaccgcatcacgccgatgaccagcaccgcccaccgcctgcaactgcacgatgaacacggcatcgacgatgcctggccagttgtttgcgaaccctttgtgcagtgggtactggaagacaaattcgtcaacggccgcccggcgtgggaaaaggttggcgtgcagttcaccgacgatgtgacaccctatgaagagatgaagatcggcttgctcaacggcagccacctggccctgacctacctgggttttctcaagggctatcggtttgtgcacgagaccatgaacgacccgctgttcgtggcctacatgcgcgcctacatggacctcgacgtcacgccaaacctcgcgccggtaccgggcatcgacctgaccgactacaagcagaccctggtggaccgcttctccaaccaggcgattgccgaccagttggaacgggtgtgttcggatggctcgtcgaagtttcccaagttcaccgtgccgaccatcaaccgcctgattgccgacggccgtgagaccgagcgtgcagcactggtcgtcgcggcctgggccttgtatttgaagggtgtggatgagaatggcgtgagctacacaatccccgatccgcgcgccgagttctgccaggggctggtgagtgacgatgcactgatcagccagcggttgctggcagtggaagagattttcggtacggctattcccaactcgcctgagtttgtggcagcgttcgagcggtgctatgggagcctgcgtgataacggcgtcaccactaccctgaagcacctcctgaagaaaccggtttaa

SEQ ID NO: 184 - protein, 493 aa, Pseudomonas fluorescens
MKLNKQNLTQLAPEVKLPAYTLADTRQGIAHIGVGGFHRAHQAYYTDALMNTGEGLDWSICGVGLRSEDRKARDDLAGQDYLFTLYELGDTDDTEVRVIGSISDMLLAEDSAQALIDKLASPEIRIVSLTITEGGYCIDDSNGEFMAHLPQIQHDLAHPSSPKTVFGFICAALTQRRAAGIPAFTVMSCDNLPHNGAVTRKALLAFAALHNAELHDWIKAHVSFPNAMVDRITPMTSTAHRLQLHDEHGIDDAWPVVCEPFVQWVLEDKFVNGRPAWEKVGVQFTDDVTPYEEMKIGLLNGSHLALTYLGFLKGYRFVHETMNDPLFVAYMRAYMDLDVTPNLAPVPGIDLTDYKQTLVDRFSNQAIADQLERVCSDGSSKFPKFTVPTINRLIADGRETERAALVVAAWALYLKGVDENGVSYTIPDPRAEFCQGLVSDDALISQRLLAVEEIFGTAIPNSPEFVAAFERCYGSLRDNGVTTTLKHLLKKPV

SEQ ID NO: 185 - DNA, 1368 bp, Klebsiella pneumoniae
ttagttaatcagcgtgtaaacggcggcgactttctcgcgcatcagcgccaggaaatccgcgttgttggcgagatcaccaaacagggctttatcacgggcgaagacagccaccggatcctgagcctcgaacatctcatgcaccgcctgcgcatccaggatgccgtcctggtactgatatggcagagttcccttgtgccactgctccataaagacgaagaacagcgccggcagcatggcggtcgcttccgggcggacgccgcgctggtagcactcctgcaaggttggcgcgatcatcgccggaattttcgagaagccgtcggcggcgacgcgctggttggtgtcctggatataggggttggtaaagcgcttaagcaccacatcccggtaggtcggcagatcaatgccgttgtcgccgagacacggaataacgtcctccgtaacgtagcggtcggcaatggcgtagataacatcggtcagcgtgctttcatgaatatactgctggccgattaaggttcccgcccaggcaatgcagctgtgcgacgcgttcaaaatacggattttcgcctcttcatacgggatgaccgactccaccatctccacgccgactgcctccagattcgggcggacatcgcggaagttgttctccactacccactggataaaggtctcccccatcaccggcgctttgtcatcaattccggcttgcgctttgatgcgggccggcagatcggccgccggacgcggggtgatgcggtccaccatggtgttcggacaggtggtattggccgccatccagtcaatcaccgcctgtttgccggtgagctgcaggaactcgaccataccgtcgtggaaacgctcgccgttatggcgcacgttatcgcagttgagcagggtcagcggcccggcgttgtcggccatgcgcttttccaggatccgcgcgagggtgccgtaaatggttttgcactcgccttgcaggtcggcctgcagatcggggttgctggtttccagccgatggcgagtgttcaggtagtaccccccttccgtcacggtaaaggcgataactttggtctgcgggtttgccccttcgttaatcagcggctgtagcccggcctgccacggtagcagtttctggattgaggtgatctcttcatattcgcgctccccttccgggctgacggtctcgaggacgtaacgtcctccctgcgccgccagcgcctggaccacctgctcggcgtcgttgcgaatattccccgccgcgatgcgccagcgattatccccggaagcaatcagacgatgcagataccacgcctgatgcgcgcgatgaaaagaacccagaccgatatgaagccatgtgaattgattgttcat

SEQ ID NO: 186 - protein, 455 aa, Klebsiella pneumoniae
MNNQFTWLHIGLGSFHRAHQAWYLHRLIASGDNRWRIAAGNIRNDAEQVVQALAAQGGRYVLETVSPEGEREYEEITSIQKLLPWQAGLQPLINEGANPQTKVIAFTVTEGGYYLNTRHRLETSNPDLQADLQGECKTIYGTLARILEKRMADNAGPLTLLNCDNVRHNGERFHDGMVEFLQLTGKQAVIDWMAANTTCPNTMVDRITPRPAADLPARIKAQAGIDDKAPVMGETFIQWVVENNFRDVRPNLEAVGVEMVESVIPYEEAKIRILNASHSCIAWAGTLIGQQYIHESTLTDVIYAIADRYVTEDVIPCLGDNGIDLPTYRDVVLKRFTNPYIQDTNQRVAADGFSKIPAMIAPTLQECYQRGVRPEATAMLPALFFVFMEQWHKGTLPYQYQDGILDAQAVHEMFEAQDPVAVFARDKALFGDLANNADFLALMREKVAAVYTLIN

SEQ ID NO: 187 - DNA, 1398 bp, Ralstonia solanacearum
atgacgcggtcgtccctcgcgcgtgcgccagtgctgctgcatattggcgccggatctttccatcgtgcgcaccaggcgtggtatctgcatcgcgtcaacgcggccgtgcctcccggcgagcgctggacgctgacggtcgggaacattcgcgacgacatgcacgcgacactcgccgcgctggccgcgcagcagggtgcctacacgctcgagaccgtcacgccgcaaggcgagcgtgcgtatgagacgatccgctcgatcgcgcgggtgctgccctggtccgccgatcttgccgcgctcatcaatacgggcgccgatcccgcgtgccggatcgtgtcgtttacggtcaccgaaggcgggtattacctcgacgagcacgatcgtctcgatgtcacgcatcccgatctcgcggccgacctgcggggcgcccgctcgacgctatacggcgcattggccgcgttgctcgccgagcgccgccagcgcggagccgggccgctcacgctgcagagttgcgacaatctgcgcagcaacggcgcgcgttttcgcgcgggcatgcgcgcgttcctcgcgctgcgcggcgacgcagcgctcctcgcgtggttcgatgccaacgtatcgtgcccgagcgcgatggtcgaccggatcacgccgcggccgaccgacgacgtccgcacgcgcgtgcacgcggccaccggcgtcgacgaccgctgcccggtcatgggcgaatccttcatccaatgggtgatcgaggacaacttcatcgccggccggccggcatgggagatcgcgggcgcggagatcgtcgccgatgtgcatccgtacgaagaggcgaagatccggatcctgaatgcgacgcacagctgcatcgcctgggcgggcacgctcgcgggactcacctacattcacgaagggatgcgtgatgcggccatttatcgcttcgcctacgactacgtcaccgacgacgtgattccctgcctgacgccgagcccgctggatctcgagcgctatcgggacgtcgtgctcgagcgcttcggcaatccgtacgtgctcgacaccaaccagcgtgtcgccgccgatggcttctcgaaaatccccggcttcatcgcaccgacgctcgccgaatgctttgcgcgcggcgccgatccggtcgcgaccgcggtgttgccggcgctgtttctgggcttccttgaaggttgggcgcgcggcaccttgccctacgtataccaggacggcgtgatggatggcgccgccgcacgcagcatcgtcgaggctccggattccgttgccgcgttctgttcagatcgccaattgtggggttcgcttgcgggccgcgacgcgcttgtccaggcggtgcgtgcgggacgcgcgcgcgttgaagcatggcgagccgcacgccgctga

SEQ ID NO: 188 - protein, 465 aa, Ralstonia solanacearum
MTRSSLARAPVLLHIGAGSFHRAHQAWYLHRVNAAVPPGERWTLTVGNIRDDMHATLAALAAQQGAYTLETVTPQGERAYETIRSIARVLPWSADLAALINTGADPACRIVSFTVTEGGYYLDEHDRLDVTHPDLAADLRGARSTLYGALAALLAERRQRGAGPLTLQSCDNLRSNGARFRAGMRAFLALRGDAALLAWFDANVSCPSAMVDRITPRPTDDVRTRVHAATGVDDRCPVMGESFIQWVIEDNFIAGRPAWEIAGAEIVADVHPYEEAKIRILNATHSCIAWAGTLAGLTYIHEGMRDAAIYRFAYDYVTDDVIPCLTPSPLDLERYRDVVLERFGNPYVLDTNQRVAADGFSKIPGFIAPTLAECFARGADPVATAVLPALFLGFLEGWARGTLPYVYQDGVMDGAAARSIVEAPDSVAAFCSDRQLWGSLAGRDALVQAVRAGRARVEAWRAARR

SEQ ID NO: 189 - DNA, 1185 bp, Bacillus subtilis
atgaatcgtatcgcagctgacgttcagcgtgcttttgaaaacgccggagaaaagacgttgcctataaaagttgaagaaattgttctcggtaagcaagcagctgattcgcttttggattatgtaaaacgaaaaaacaatcaacatattgtccttgtctgcgacgcgaatacacaccgcattgcaggaattgatttagaaaaccgactgaatcaagaaggatttcaggccgagtgcctgatcattccagaaaatgaagccggagatgtgacagctgatgaacgatcgctcattcatgtgctgatccatacgaaacaaccaacggatgtcatgatcgcagtcggttcgggcacgattcatgatatcgtccgctttgcggcgtttcaaagagatttgccgtttatttcttatccgactgctccatctgtagacggttttacatcagccggtgcgccgattattttatacggcacgaaaacaaccattcaaacgaaggccccatctgcgctgttcgctgatctggatctattaaaagcggcaccgcagtcaatggtggcggctggctttggtgacatgctcggtaaaatcacgtctttagcagattgggaaatatcccggcatcttgccggtgagccttattcgcctgcaggagctaagatcgttcaggaggcgcttgctgcctgcattgaacacacagaagacattgcgatgaaaacggaaactggcatacgggttttgatggagtctttacttgtatcggggcttgtcatgctggcattagatcattcccgaccggcatcaggcggcgagcatcatatttcacattggattgaaatggagttaatggagaaaaaacggcctcagattcttcatggggcaaaggtgggctgtgccgctgttttattaactgacacatacagaaagctcgctcaggatgacgggctgaacgaattttcaccaagccgccgggaagccatccaatcggcttatcaaacactcccgagaggagaagtgctggctgattggctgagatcagccggaggccctgcgtattttgacgaaatcggtgtcgggcaggattccgtcaaaaatgccttcagacacgcgcacaccttaagagaccgatgcaccggattaagaatcatcaatgaaaacaaaacgctgatcaaccatggtctatatgaatag

SEQ ID NO: 190 - protein, 394 aa, Bacillus subtilis
MNRIAADVQRAFENAGEKTLPIKVEEIVLGKQAADSLLDYVKRKNNQHIVLVCDANTHRIAGIDLENRLNQEGFQAECLIIPENEAGDVTADERSLIHVLIHTKQPTDVMIAVGSGTIHDIVRFAAFQRDLPFISYPTAPSVDGFTSAGAPIILYGTKTTIQTKAPSALFADLDLLKAAPQSMVAAGFGDMLGKITSLADWEISRHLAGEPYSPAGAKIVQEALAACIEHTEDIAMKTETGIRVLMESLLVSGLVMLALDHSRPASGGEHHISHWIEMELMEKKRPQILHGAKVGCAAVLLTDTYRKLAQDDGLNEFSPSRREAIQSAYQTLPRGEVLADWLRSAGGPAYFDEIGVGQDSVKNAFRHAHTLRDRCTGLRIINENKTLINHGLYE

SEQ ID NO: 191 - DNA, 1059 bp, Aeropyrum pernix
ttgtatacctcgttccacaggatagacctcccgaggactatagtagtcggcggaggcgttctcgacaaggcgggcggctatgtatctggggtggctcagcgaggcagctatgtgctcgtcgtatccggcccaacggtgtcctcgaaatacttcgagaggcttagagccagcctcgaggccgagggccttacagtcggcctgaagataatcagggacgccacggttgagactgctgaggaggtggcccgtgaggctcttgagagcaggatagaggttgtggcgggcctgggaggtgggaagtcgatagacgttgctaagtacgcttcaaaaagggcgggctcggttttcgtcagcatacccaccgtggctagccacgacgggataacatcgccattctcaagcctgaaggggttcgacaagcctatatcgaggcccgctaaggctccggaggcgataattatagatgtggatgtgatagcggaggctcccaggcgctacaacatcgctggcttcggagacctgataggcaagtatactgcagtcctcgactggaggctggcccacaagctcaggctggaatactatggcgaatacgccgccagtctcgccctcctgagcgccaaacatgtgagccagtacgccgaggagatagcgctgggtacgagggagggctatagagtgctgctggaggctctcgtgagcagcggggtgtcgatgtgtatagccggtagcacgaggcctgcaagcggcagtgaacacctcttcgcccacgccctccacatagtcgctaggaacaagcctctccacggcgaggcggttggggtggggactataatgatggcctacctccacggtaagaactggaggaggataaggggcctgctgaagacggtcggcgcccccactaacgccaaggagcttggtgtcgaggatgatgaggttgttgaggccctcactatagcagccaggatcagaccggagaggtacaccatactaggtgaaaaggggctcacgagagaggcggctgaggcgctggcgcgcaagacgggcgttatatag

SEQ ID NO: 192 - protein, 352 aa, Aeropyrum pernix
MYTSFHRIDLPRTIVVGGGVLDKAGGYVSGVAQRGSYVLVVSGPTVSSKYFERLRASLEAEGLTVGLKIIRDATVETAEEVAREALESRIEVVAGLGGGKSIDVAKYASKRAGSVFVSIPTVASHDGITSPFSSLKGFDKPISRPAKAPEAIIIDVDVIAEAPRRYNIAGFGDLIGKYTAVLDWRLAHKLRLEYYGEYAASLALLSAKHVSQYAEEIALGTREGYRVLLEALVSSGVSMCIAGSTRPASGSEHLFAHALHIVARNKPLHGEAVGVGTIMMAYLHGKNWRRIRGLLKTVGAPTNAKELGVEDDEVVEALTIAARIRPERYTILGEKGLTREAAEALARKTGVI

SEQ ID NO: 193 - DNA, 1020 bp, Escherichia coli
atgaaccaacgtaatgcttcaatgactgtgatcggtgccggctcgtacggcaccgctcttgccatcaccctggcaagaaatggccacgaggttgtcctctggggccatgaccctgaacatatcgcaacgcttgaacgcgaccgctgtaacgccgcgtttctccccgatgtgccttttcccgatacgctccatcttgaaagcgatctcgccactgcgctggcagccagccgtaatattctcgtcgtcgtacccagccatgtctttggtgaagtgctgcgccagattaaaccactgatgcgtcctgatgcgcgtctggtgtgggcgaccaaagggctggaagcggaaaccggacgtctgttacaggacgtggcgcgtgaggccttaggcgatcaaattccgctggcggttatctctggcccaacgtttgcgaaagaactggcggcaggtttaccgacagctatttcgctggcctcgaccgatcagacctttgccgatgatctccagcagctgctgcactgcggcaaaagtttccgcgtttacagcaatccggatttcattggcgtgcagcttggcggcgcggtgaaaaacgttattgccattggtgcggggatgtccgacggtatcggttttggtgcgaatgcgcgtacggcgctgatcacccgtgggctggctgaaatgtcgcgtcttggtgcggcgctgggtgccgaccctgccacctttatgggcatggcggggcttggcgatctggtgcttacctgtaccgacaaccagtcgcgtaaccgccgttttggcatgatgctcggtcagggcatggatgtacaaagcgcgcaggagaagattggtcaggtggtggaaggctaccgcaatacgaaagaagtccgcgaactggcgcatcgcttcggcgttgaaatgccaataaccgaggaaatttatcaagtattatattgcggaaaaaacgcgcgcgaggcagcattgactttactaggtcgtgcacgcaaggacgagcgcagcagccactaa

SEQ ID NO: 194 - protein, 339 aa, Escherichia coli
MNQRNASMTVIGAGSYGTALAITLARNGHEVVLWGHDPEHIATLERDRCNAAFLPDVPFPDTLHLESDLATALAASRNILVVVPSHVFGEVLRQIKPLMRPDARLVWATKGLEAETGRLLQDVAREALGDQIPLAVISGPTFAKELAAGLPTAISLASTDQTFADDLQQLLHCGKSFRVYSNPDFIGVQLGGAVKNVIAIGAGMSDGIGFGANARTALITRGLAEMSRLGAALGADPATFMGMAGLGDLVLTCTDNQSRNRRFGMMLGQGMDVQSAQEKIGQVVEGYRNTKEVRELAHRFGVEMPITEEIYQVLYCGKNAREAALTLLGRARKDERSSH

SEQ ID NO: 195 - DNA, 1176 bp, Saccharomyces cerevisiae
atgtctgctgctgctgatagattaaacttaacttccggccacttgaatgctggtagaaagagaagttcctcttctgtttctttgaaggctgccgaaaagcctttcaaggttactgtgattggatctggtaactggggtactactattgccaaggtggttgccgaaaattgtaagggatacccagaagttttcgctccaatagtacaaatgtgggtgttcgaagaagagatcaatggtgaaaaattgactgaaatcataaatactagacatcaaaacgtgaaatacttgcctggcatcactctacccgacaatttggttgctaatccagacttgattgattcagtcaaggatgtcgacatcatcgttttcaacattccacatcaatttttgccccgtatctgtagccaattgaaaggtcatgttgattcacacgtcagagctatctcctgtctaaagggttttgaagttggtgctaaaggtgtccaattgctatcctcttacatcactgaggaactaggtattcaatgtggtgctctatctggtgctaacattgccaccgaagtcgctcaagaacactggtctgaaacaacagttgcttaccacattccaaaggatttcagaggcgagggcaaggacgtcgaccataaggttctaaaggccttgttccacagaccttacttccacgttagtgtcatcgaagatgttgctggtatctccatctgtggtgctttgaagaacgttgttgccttaggttgtggtttcgtcgaaggtctaggctggggtaacaacgcttctgctgccatccaaagagtcggtttgggtgagatcatcagattcggtcaaatgtttttcccagaatctagagaagaaacatactaccaagagtctgctggtgttgctgatttgatcaccacctgcgctggtggtagaaacgtcaaggttgctaggctaatggctacttctggtaaggacgcctgggaatgtgaaaaggagttgttgaatggccaatccgctcaaggtttaattacctgcaaagaagttcacgaatggttggaaacatgtggctctgtcgaagacttcccattatttgaagccgtataccaaatcgtttacaacaactacccaatgaagaacctgccggacatgattgaagaattagatctacatgaagattag

SEQ ID NO: 196 - protein, 391 aa, Saccharomyces cerevisiae
MSAAADRLNLTSGHLNAGRKRSSSSVSLKAAEKPFKVTVIGSGNWGTTIAKVVAENCKGYPEVFAPIVQMWVFEEEINGEKLTEIINTRHQNVKYLPGITLPDNLVANPDLIDSVKDVDIIVFNIPHQFLPRICSQLKGHVDSHVRAISCLKGFEVGAKGVQLLSSYITEELGIQCGALSGANIATEVAQEHWSETTVAYHIPKDFRGEGKDVDHKVLKALFHRPYFHVSVIEDVAGISICGALKNVVALGCGFVEGLGWGNNASAAIQRVGLGEIIRFGQMFFPESREETYYQESAGVADLITTCAGGRNVKVARLMATSGKDAWECEKELLNGQSAQGLITCKEVHEWLETCGSVEDFPLFEAVYQIVYNNYPMKNLPDMIEELDLHED

SEQ ID NO: 197 - DNA, 1224 bp, Escherichia coli
atgaaacgtgcatttattatggtgctggactcattcggcatcggcgctacagaagatgcagaacgctttggtgacgtcggggctgacaccctgggtcatatcgcagaagcttgtgccaaaggcgaagctgataacggtcgtaaaggcccgctcaatctgccaaatctgacccgtctggggctggcgaaagcacacgaaggttctaccggtttcattccggcgggaatggacggcaacgctgaagttatcggcgcgtacgcatgggcgcacgaaatgtcatccggtaaagataccccgtctggtcactgggaaattgccggtgtcccggttctgtttgagtggggatatttctccgatcacgaaaacagcttcccgcaagagctgctggataaactggtcgaacgcgctaatctgccgggttacctcggtaactgccactcttccggtacggtcattctggatcaactgggcgaagagcacatgaaaaccggcaagccgattttctatacctccgctgactccgtgttccagattgcctgccatgaagaaactttcggtctggataaactctacgaactgtgcgaaatcgcccgtgaagagctgaccaacggcggctacaatatcggtcgtgttatcgctcgtccgtttatcggcgacaaagccggtaacttccagcgtaccggtaaccgtcacgacctggctgttgagccgccagcaccgaccgtgctgcagaaactggttgatgaaaaacacggccaggtggtttctgtcggtaaaattgcggacatctacgccaactgcggtatcaccaaaaaagtgaaagcgactggcctggacgcgctgtttgacgccaccatcaaagagatgaaagaagcgggtgataacaccatcgtcttcaccaacttcgttgacttcgactcttcctggggccaccgtcgcgacgtcgccggttatgccgcgggtctggaactgttcgaccgccgtctgccggagctgatgtctctgctgcgcgatgacgacatcctgatcctcaccgctgaccacggttgcgatccgacctggaccggtactgaccacacgcgtgaacacattccggtactggtatatggcccgaaagtaaaaccgggctcactgggtcatcgtgaaaccttcgcggatatcggccagactctggcaaaatattttggtacttctgatatggaatatggcaaagccatgttctga

SEQ ID NO: 198 - protein, 407 aa, Escherichia coli
MKRAFIMVLDSFGIGATEDAERFGDVGADTLGHIAEACAKGEADNGRKGPLNLPNLTRLGLAKAHEGSTGFIPAGMDGNAEVIGAYAWAHEMSSGKDTPSGHWEIAGVPVLFEWGYFSDHENSFPQELLDKLVERANLPGYLGNCHSSGTVILDQLGEEHMKTGKPIFYTSADSVFQIACHEETFGLDKLYELCEIAREELTNGGYNIGRVIARPFIGDKAGNFQRTGNRHDLAVEPPAPTVLQKLVDEKHGQVVSVGKIADIYANCGITKKVKATGLDALFDATIKEMKEAGDNTIVFTNFVDFDSSWGHRRDVAGYAAGLELFDRRLPELMSLLRDDDILILTADHGCDPTWTGTDHTREHIPVLVYGPKVKPGSLGHRETFADIGQTLAKYFGTSDMEYGKAMF

SEQ ID NO: 199 - DNA, 1641 bp, Escherichia coli
atggcaatccacaatcgtgcaggccaacctgcacaacagagtgatttgattaacgtcgcccaactgacggcgcaatattatgtactgaaaccagaagcagggaatgcggagcacgcggtgaaattcggtacttccggtcaccgtggcagtgcagcgcgccacagctttaacgagccgcacattctggcgatcgctcaggcaattgctgaagaacgtgcgaaaaacggcatcactggcccttgctatgtgggtaaagatactcacgccctgtccgaacctgcattcatttccgttctggaagtgctggcagcgaacggcgttgatgtcattgtgcaggaaaacaatggcttcaccccgacgcctgccgtttccaatgccatcctggttcacaataaaaaaggtggcccgctggcagacggtatcgtgattacaccgtcccataacccgccggaagatggtggaatcaaatacaatccgccaaatggtggcccggctgataccaacgtcactaaagtggtggaagacagggccaacgcactgctggccgatggcctgaaaggcgtgaagcgtatctccctcgacgaagcgatggcatccggtcatgtgaaagagcaggatctggtgcagccgttcgtggaaggtctggccgatatcgttgatatggccgcgattcagaaagcgggcctgacgctgggcgttgatccgctgggcggttccggtatcgaatactggaagcgtattggcgagtattacaacctcaacctgactatcgttaacgatcaggtcgatcaaaccttccgctttatgcaccttgataaagacggcgcgatccgtatggactgctcctccgagtgtgcgatggcgggcctgctggcactgcgtgataagttcgatctggcgtttgctaacgacccggattatgaccgtcacggtatcgtcactccggcaggtttgatgaatccgaaccactacctggcggtggcaatcaattacctgttccagcatcgtccgcagtggggcaaagatgttgccgtcggtaaaacgctggtttcatctgcgatgatcgaccgtgtggtcaacgacttgggccgtaaactggtagaagtcccggtaggtttcaaatggtttgtcgatggtctgttcgacggcagcttcggctttggcggcgaagagagtgcaggggcttccttcctgcgtttcgacggcacgccgtggtccaccgacaaagacggcatcatcatgtgtctgctggcggcggaaatcaccgctgtcaccggtaagaacccgcaggaacactacaacgaactggcaaaacgctttggtgcgccgagctacaaccgtttgcaggcagctgcgacttccgcacaaaaagcggcgctgtctaagctgtctccggaaatggtgagcgccagcaccctggcaggtgacccgatcaccgcgcgcctgactgctgctccgggcaacggtgcttctattggcggtctgaaagtgatgactgacaacggctggttcgccgcgcgtccgtcaggcacggaagacgcatataagatctactgcgaaagcttcctcggtgaagaacatcgcaagcagattgagaaagaagcggttgagattgttagcgaagttctgaaaaacgcgtaa

SEQ ID NO: 200 - protein, 546 aa, Escherichia coli
MAIHNRAGQPAQQSDLINVAQLTAQYYVLKPEAGNAEHAVKFGTSGHRGSAARHSFNEPHILAIAQAIAEERAKNGITGPCYVGKDTHALSEPAFISVLEVLAANGVDVIVQENNGFTPTPAVSNAILVHNKKGGPLADGIVITPSHNPPEDGGIKYNPPNGGPADTNVTKVVEDRANALLADGLKGVKRISLDEAMASGHVKEQDLVQPFVEGLADIVDMAAIQKAGLTLGVDPLGGSGIEYWKRIGEYYNLNLTIVNDQVDQTFRFMHLDKDGAIRMDCSSECAMAGLLALRDKFDLAFANDPDYDRHGIVTPAGLMNPNHYLAVAINYLFQHRPQWGKDVAVGKTLVSSAMIDRVVNDLGRKLVEVPVGFKWFVDGLFDGSFGFGGEESAGASFLRFDGTPWSTDKDGIIMCLLAAEITAVTGKNPQEHYNELAKRFGAPSYNRLQAAATSAQKAALSKLSPEMVSASTLAGDPITARLTAAPGNGASIGGLKVMTDNGWFAARPSGTEDAYKIYCESFLGEEHRKQIEKEAVEIVSEVLKNA

SEQ ID NO: 201 - DNA, 1746 bp, Bacillus subtilis
atgacttggagaaagagctatgaacgctggaaacagacagaacatttagatctggaattaaaagagcgccttattgaattagagggagatgaacaggcccttgaggactgtttctataaagaccttgaattcggtaccggcggaatgcgcggggaaatcggcgccgggacaaatcggatgaatatttacactgtgcgcaaagcatcggccgggtttgcggcatacatctcgaagcaaggtgaggaagcgaaaaaacggggcgttgtcattgcttatgattcccgccataagtctccggagttcgcgatggaagcggcaaaaacacttgcgacacaaggcatccaaacatacgtgtttgatgagcttcgcccgacgccagagctgtcattcgctgttagacagctgaacgcttatggtggaattgtggtaacggcaagccataacccgcctgaatataacggctacaaagtatacggggatgatggcggccagctgcctccaaaggaagcggacatcgtcattgagcaggtaaacgcgattgaaaatgagctgacgatcacagtggacgaagaaaataagttaaaagaaaaaggcttaatcaaaatcatcggtgaagatattgataaagtttatacagaaaaactgacgtccatttctgtacatcctgaattatcggaagaagtagatgtaaaggttgttttcacaccgctgcatggaactgcaaataaaccggtcagacgcggtcttgaagcactcggctacaaaaatgtaacggttgtcaaagaacaggaactgccggattcaaacttctccactgttacatcgccgaacccggaagagcatgcggcattcgaatatgccattaagcttggggaggagcagaatgcagatattctcatcgcgacagatcctgatgctgaccgcctcggcatcgcggtgaaaaacgatcaaggcaaatatacagtgctgacaggaaaccaaaccggagcgttgctgcttcattacctgctttctgaaaagaaaaaacaaggcatcctgcctgataacggtgttgttctcaaaacgatcgtcacaagcgaaatcggccgtgctgtagcttcttcattcggccttgatacgattgatacgctgacaggctttaagtttatcggtgaaaagattaaggaatacgaagcatcaggccagtataccttccaattcggttatgaagagagctacggttatttaatcggggattttgcccgcgataaggacgccattcaggctgcgcttttggcagttgaagtttgcgcgttctataaaaaacagggaatgtcattgtatgaggcgctcatcaatctctttaacgaatatggtttttatcgtgaagggctgaaatccctgacgctgaaaggcaaacaaggagcagagcaaattgaagcgattcttgcttccttcagacaaaatccgccgcagaaaatggcgggcaaacaggttgtcacagcagaagattacgctgtaagcaaacggacgcttctgactgaaagcaaagaagaagccatcgacttgccaaaatcaaatgtattgaaatacttcctggaagacgggtcttggttctgtctccgtccttctggaactgagccgaaggttaaattttatttcgccgtaaaagggtcatctttggaagacagtgaaaagcgacttgccgtcctttctgaagatgtaatgaagacggtggatgaaattgttgagtcaacagcaaaataa

SEQ ID NO: 202 - protein, 581 aa, Bacillus subtilis
MTWRKSYERWKQTEHLDLELKERLIELEGDEQALEDCFYKDLEFGTGGMRGEIGAGTNRMNIYTVRKASAGFAAYISKQGEEAKKRGVVIAYDSRHKSPEFAMEAAKTLATQGIQTYVFDELRPTPELSFAVRQLNAYGGIVVTASHNPPEYNGYKVYGDDGGQLPPKEADIVIEQVNAIENELTITVDEENKLKEKGLIKIIGEDIDKVYTEKLTSISVHPELSEEVDVKVVFTPLHGTANKPVRRGLEALGYKNVTVVKEQELPDSNFSTVTSPNPEEHAAFEYAIKLGEEQNADILIATDPDADRLGIAVKNDQGKYTVLTGNQTGALLLHYLLSEKKKQGILPDNGVVLKTIVTSEIGRAVASSFGLDTIDTLTGFKFIGEKIKEYEASGQYTFQFGYEESYGYLIGDFARDKDAIQAALLAVEVCAFYKKQGMSLYEALINLFNEYGFYREGLKSLTLKGKQGAEQIEAILASFRQNPPQKMAGKQVVTAEDYAVSKRTLLTESKEEAIDLPKSNVLKYFLEDGSWFCLRPSGTEPKVKFYFAVKGSSLEDSEKRLAVLSEDVMKTVDEIVESTAK

SEQ ID NO: 203 - DNA, 666 bp, Lactococcus lactis
atgtttaaagcagtattgtttgatttagatggtgtaattacagataccgcagagtatcattttagagcttggaaagctttggctgaagaaattggcattaatggtgttgaccgccaatttaatgagcaattaaaaggggtctcacgagaagactcgcttcagaaaattctagatttagctgataaaaaagtatcagctgaggaatttaaagaacttgctaagagaaaaaatgataactatgtgaaaatgattcaggatgtgtcgccagccgatgtctatcctggaattttacaattactcaaagatttacgttcaaataaaatcaaaattgctttagcatcggcttctaagaatggtccatttttattagagaaaatgaatttaactggatattttgatgcaattgctgatccggctgaagttgcagcatcaaaaccagcaccagatatttttattgcagcagcacatgcagtgggtgttgccccctctgaatcaattgggttagaggattctcaagctggaattcaagccatcaaagattcaggggctttaccaattggtgtagggcgcccagaagatttgggagatgatatcgtcattgtgcctgatacttcatactatacattagaatttttgaaagaagtttggcttcaaaagcaaaaatga

SEQ ID NO: 204 - protein, 221 aa, Lactococcus lactis
MFKAVLFDLDGVITDTAEYHFRAWKALAEEIGINGVDRQFNEQLKGVSREDSLQKILDLADKKVSAEEFKELAKRKNDNYVKMIQDVSPADVYPGILQLLKDLRSNKIKIALASASKNGPFLLEKMNLTGYFDAIADPAEVAASKPAPDIFIAAAHAVGVAPSESIGLEDSQAGIQAIKDSGALPIGVGRPEDLGDDIVIVPDTSYYTLEFLKEVWLQKQK

SEQ ID NO: 205 - DNA, 660 bp, Escherichia coli
atgaaactgcaaggggtaattttcgatctggatggtgtaatcaccgataccgcgcatctgcatttccaggcgtggcagcagattgccgctgaaattggcatcagcattgatgcgcagtttaacgaatccctaaaagggatcagccgcgatgagtctctgcggcgcattctgcaacacgggggcaaagagggcgactttaactcgcaggagagggcgcaactggcgtatcgcaaaaatctgctctatgtccactcactacgcgagttgacggtcaacgctgttctacccggcattcgctctttgctggcagatctccgtgcacagcagatctcggttgggctggcttctgtctccctgaatgcgccgacgattttagcggcgctggagctgcgcgagtttttcaccttctgcgcggatgcttcccaacttaaaaactcgaaaccggacccggaaatctttctcgccgcctgtgcagggctgggcgtgccgccgcaggcatgtatcggcattgaagatgcgcaggcgggcattgacgccattaacgccagcggtatgcgctcggtggggatcggcgcgggcttaaccggggcgcaattactgttgccttcaacggaatcactcacctggccgcggttatcggccttctggcaaaacgtatag

SEQ ID NO: 206 - protein, 219 aa, Escherichia coli [sequence omitted]

SEQ ID NO: 207 - DNA, 1392 bp, Pseudomonas aeruginosa
atgagcactgtaaaagcaccgacgctgcccgccagcatcttccgcgcctacgacatccgtcgcgtggtaggcgataccctcaccgccgagaccgcctactggatcggtcgcgccatcggctcggaaagcctcgcccgcggcgaaccgtgcgtcgctgtcggccgcgatggccgcctgtccggtcccgagctggtcaagcagctgatccagggcctggtggactgcggttgccaggtcagcgacgtgggcatggtgcctaccccggtgctgtactacgcggccaacgtgctcgagggcaagtccggggtgatgctgaccggcagccacaatccgccggactacaacggcttcaagatcgtggtcgccggcgagaccctggccaacgagcagatccaggccctgcgcgagcgcatcgagaaaaacgacctggcatccggcgtcggcagcgtagagcaggtcgacatcctgccgcgctacttcaagcagatccgcgacgacatcgccatggccaagccgatgaaggtggtggtcgactgcggcaacggcgtggccggggtgatcgccccgcagttgatcgaggccctgggctgcagcgtgatcccgctgtactgcgaggtcgacggcaacttcccgaaccaccatccggacccgggcaagccggagaacctgaaggacctgatcgccaaggtcaaggccgagaacgccgacctgggcctggccttcgacggcgacggcgatcgcgtcggcgtggtcaccaataccggtaccatcatctatccggaccgtctgctgatgctgttcgccaaggacgtggtctcgcgcaacccgggggccgacatcatcttcgacgtcaagtgcacccgccgtctgatcgccctgatcagcggctacggcggccgtccggtgatgtggaagaccggccactcgctgatcaagaagaagatgaaggaaaccggcgccctgctggctggcgagatgagcggccacgtgttcttcaaggagcgctggttcggcttcgacgatggcatctacagcgccgcccgcctgctggaaatcctcagccaggatcagcgtgacagcgagcacgtgttctcggccttcccgagcgacatttccaccccggaaatcaacatcaccgtcaccgaggacagcaagttcgccatcatcgaggcgctgcaacgcgacgcccaatggggcgaaggcaacatcaccaccctcgacggcgtgcgggtcgactaccccaaaggctggggcctggtacgcgcctccaacaccactcccgtgctggtcctgcgcttcgaagcggaccccgaggaagagctggagcgcatcaagaccgtcttccgtaaccaactgaaggcagtggattcctcgctgcccgtgcccttctga

SEQ ID NO: 208 - protein, 463 aa, Pseudomonas aeruginosa
MSTAKAPTLPASIFRAYDIRGVVGDTLTAETAYWIGRAIGSESLARGEPCVAVGRDGRLSGPELVKQLIQGLVDCGCQVSDVGMVPTPVLYYAANVLEGKSGVMLTGSHNPPDYNGFKIVVAGETLANEQIQALRERIEKNDLASGVGSVEQVDILPRYFKQIRDDIAMAKPMKVVVDCGNGVAGVIAPQLIEALGCSVIPLYCEVDGNFPNHHPDPGKPENLKDLIAKVKAENADLGLAFDGDGDRVGVVTNTGTIIYPDRLLMLFAKDVVSRNPGADIIFDVKCTRRLIALISGYGGRPVMWKTGHSLIKKKMKETGALLAGEMSGHVFFKERWFGFDDGIYSAARLLEILSQDQRDSEHVFSAFPSDISTPEINITVTEDSKFAIIEALQRDAQWGEGNITTLDGVRVDYPKGWGLVRASNTTPVLVLRFEADTEEELERIKTVFRNQLKAVDSSLPVPF

SEQ ID NO: 209 - DNA, 1371 bp, Escherichia coli
atgaaaaaattaacctgctttaaagcctatgatattcgcgggaaattaggcgaagaactgaatgaagatatcgcctggcgcattggtcgcgcctatggcgaatttctcaaaccgaaaaccattgtgttaggcggtgatgtccgcctcaccagcgaaaccttaaaactggcgctggcgaaaggtttacaggatgcgggcgttgacgtgctggatattggtatgtccggcaccgaagagatctatttcgccacgttccatctcggcgtggatggcggcattgaagttaccgccagccataatccgatggattataacggcatgaagctggttcgcgagggggctcgcccgatcagcggagataccggactgcgcgacgtccagcgtctggctgaagccaacgactttcctcccgtcgatgaaaccaaacgcggtcgctatcagcaaatcaacctgcgtgacgcttacgttgatcacctgttcggttatatcaatgtcaaaaacctcacgccgctcaagctggtgatcaactccgggaacggcgcagcgggtccggtggtggacgccattgaagcccgctttaaagccctcggcgcgcccgtggaattaatcaaagtgcacaacacgccggacggcaatttccccaacggtattcctaacccactactgccggaatgccgcgacgacacccgcaatgcggtcatcaaacacggcgcggatatgggcattgcttttgatggcgattttgaccgctgtttcctgtttgacgaaaaagggcagtttattgagggctactacattgtcggcctgttggcagaagcattcctcgaaaaaaatcccggcgcgaagatcatccacgatccacgtctctcctggaacaccgttgatgtggtgactgccgcaggtggcacgccggtaatgtcgaaaaccggacacgcctttattaaagaacgtatgcgcaaggaagacgccatctatggtggcgaaatgagcgcccaccattacttccgtgatttcgcttactgcgacagcggcatgatcccgtggctgctggtcgccgaactggtgtgcctgaaagataaaacgctgggcgaactggtacgcgaccggatggcggcgtttccggcaagcggtgagatcaacagcaaactggcgcaacccgttgaggcgattaaccgcgtggaacagcattttagccgtgaggcgctggcggtggatcgcaccgatggcatcagcatgacctttgccgactggcgctttaacctgcgcacctccaataccgaaccggtggtgcgcctgaatgtggaatcgcgcggtgatgtgccgctgatggaagcgcgaacgcgaactctgctgacgttgctgaacgagtaa

SEQ ID NO: 210 - protein, 456 aa, Escherichia coli
MKKLTCFKAYDIRGKLGEELNEDIAWRIGRAYGEFLKPKTIVLGGDVRLTSETLKLALAKGLQDAGVDVLDIGMSGTEEIYFATFHLGVDGGIEVTASHNPMDYNGMKLVREGARPISGDTGLRDVQRLAEANDFPPVDETKRGRYQQINLRDAYVDHLFGYINVKNLTPLKLVINSGNGAAGPVVDAIEARFKALGAPVELIKVHNTPDGNFPNGIPNPLLPECRDDTRNAVIKHGADMGIAFDGDFDRCFLFDEKGQFIEGYYIVGLLAEAFLEKNPGAKIIHDPRLSWNTVDVVTAAGGTPVMSKTGHAFIKERMRKEDAIYGGEMSAHHYFRDFAYCDSGMIPWLLVAELVCLKDKTLGELVRDRMAAFPASGEINSKLAQPVEAINRVEQHFSREALAVDRTDGISMTFADWRFNLRTSNTEPVVRLNVESRGDVPLMEARTRTLLTLLNE

SEQ ID NO: 211 - DNA, 2478 bp, Bifidobacterium dentium
atgacgagtcctgttattggcaccccttggaagaagctgaacgctccggtttccgaggaagctatcgaaggtgtggataagtactggcgtgcagccaactacctctccatcggccagatctatctgcgtagcaacccgctgatgaaggagcccttcacccgcgaagacgtcaagcaccgtctggtcggccactggggcaccaccccgggcctgaacttcctcatcggccacatcaaccgtctcatcgctgatcaccagcagaacaccgtgatcatcatgggcccgggccacggcggcccggctggtaccgctcagtcctacctggacggcacctacaccgagtacttcccgaacatcaccaaggatgaagctggcctgcagaagttcttccgccagttctcctacccgggcggcatcccgtcccactacgctccggagaccccgggctccatccacgaaggtggcgagctgggttacgccctgtcccacgcctatggcgctgtgatgaacaacccgagcctgttcgttccggccatcgtcggcgacggcgaagccgagaccggcccgctggccaccggctggcagtccaacaagctcgtcaacccgcgcaccgacggtatcgtgctgccgatcctgcacctcaatggctacaagatcgccaacccgaccatcctgtcccgcatctccgacgaagagctgcacgagttcttccacggcatgggctatgagccgtatgagttcgtcgccggcttcgacaacgaggatcacctgtcgatccaccgtcgtttcgccgagttgttcgagaccgtcttcgacgagatctgcgacatcaaggccgccgctcagactgacgacatgactcgtccgttctacccgatgatcatcttccgcaccccgaagggctggacctgcccgaagttcatcgacggcaagaagaccgaaggttcctggcgctcccaccaggttccgctggcttccgcccgcgataccgaggctcacttcgaggtcctcaagaactggctcgagtcctacaagccggaagagctgttcgacgccaacggcgccgtgaagccggaagtcaccgccttcatgccgaccggcgaactgcgcatcggtgagaacccgaacgccaacggtggccgcatccgcgaagagctgaacctgccggccctcgaggactacgaggtcaaggaagtcgccgagtacggccacggctggggccagctcgaggccacccgtcgtctgggcgtctacacccgcgacatcatcaagaacaacccggactccttccgtatcttcggaccggacgagaccgcttccaaccgtctgcaggccgcatacgacgtcaccaacaagcagtgggacgccggctacctgtccgctcaggttgatgagcacatggccgtcaccggtcaggtcaccgagcagctctccgagcaccagatggaaggcttcctcgaggcctacctgctcaccggccgtcacggcatctggagctcctacgagtccttcgtgcacgtgatcgactccatgctgaaccagcacgccaagtggctcgaggctaccgtccgcgagatcccgtggcgcaagccgatctcctccatgaacctgctcgtctcctcccacgtgtggcgtcaggatcacaacggcttctcccaccaggatccgggtgtcacctccgtcctgctgaacaagtgcttcaacaacgatcacgtgatcggcatctacttcccggtggattccaacatgctgctcgccgtggctgagaagtgctacaagtccaccgacatgatcaacgccatcatcgccggcaagcagccggccgccacctggctgaccctggacgaagctcgcgccgagctcgagaagggtgccgccgagtgggagtgggcctccaccgccaagtccaacgacgaagcacagatcgtgctcgcctccgctggcgatgtcccggctcaggagatcatggccgctgccgacaagctcgatgccatgggcatcaagttcaaggtcgtcaacgttgtggatctggtcaagctgcagtccaccaaggagaatgacgaagccatctccgacgccgacttcgctgacctgttcaccgaggacaagccggtcctgttcgcctaccactcctatgcccgcgacgtgcgtggtctgatctacgatcgcccgaaccacgacaacttcaacgtccacggctacgaggagcagggctccaccaccaccccgtacgacatggtgcgcgtgaacaacatcgatcgctacgagctcgttgccgaagctctgcgcatgatcgacgctgacaagtacgccgacaagatcgacgagctcgaggccttccgcaaggaagccttccagttcgcagtcgacaacggctacgatcacccggattacaccgactgggtgtactccggcgtcaacaccaacaagcagggtgctgtctccgctaccgccgcaaccgccggcgataacgagtga

SEQ ID NO: 212 - protein, 825 aa, Bifidobacterium dentium
MTSPVIGTPWKKLNAPVSEEAIEGVDKYWRAANYLSIGQIYLRSNPLMKEPFTREDVKHRLVGHWGTTPGLNFLIGHINRLIADHQQNTVIIMGPGHGGPAGTAQSYLDGTYTEYFPNITKDEAGLQKFFRQFSYPGGIPSHYAPETPGSIHEGGELGYALSHAYGAVMNNPSLFVPAIVGDGEAETGPLATGWQSNKLVNPRTDGIVLPILHLNGYKIANPTILSRISDEELHEFFHGMGYEPYEFVAGFDNEDHLSIHRRFAELFETVFDEICDIKAAAQTDDMTRPFYPMIIFRTPKGWTCPKFIDGKKTEGSWRSHQVPLASARDTEAHFEVLKNWLESYKPEELFDANGAVKPEVTAFMPTGELRIGENPNANGGRIREELNLPALEDYEVKEVAEYGHGWGQLEATRRLGVYTRDIIKNNPDSFRIFGPDETASNRLQAAYDVTNKQWDAGYLSAQVDEHMAVTGQVTEQLSEHQMEGFLEAYLLTGRHGIWSSYESFVHVIDSMLNQHAKWLEATVREIPWRKPISSMNLLVSSHVWRQDHNGFSHQDPGVTSVLLNKCFNNDHVIGIYFPVDSNMLLAVAEKCYKSTDMINAIIAGKQPAATWLTLDEARAELEKGAAEWEWASTAKSNDEAQIVLASAGDVPAQEIMAAADKLDAMGIKFKVVNVVDLVKLQSTKENDEAISDADFADLFTEDKPVLFAYHSYARDVRGLIYDRPNHDNFNVHGYEEQGSTTTPYDMVRVNNIDRYELVAEALRMIDADKYADKIDELEAFRKEAFQFAVDNGYDHPDYTDWVYSGVNTNKQGAVSATAATAGDNE

SEQ ID NO: 213 - DNA, 2478 bp, Bifidobacterium lactis
atgactaatcctgttattggtaccccatggcagaagctggatcgtccggtttccgaagaggccatcgaaggcatggacaagtactggcgcgtcgccaactacatgtctatcggccagatctacctgcgtagcaacccgctgatgaaggagcccttcacccgcgatgacgtgaagcaccgtctggtcggccactggggcaccaccccgggcctgaacttccttctcgcccacatcaaccgcctgatcgccgatcaccagcagaacaccgtgttcatcatgggtcctggccacggcggccctgcaggtaccgctcagtcctacatcgacggcacctacaccgagtactacccgaacatcaccaaggacgaagctggcctgcagaagttcttccgccagttctcctacccgggtggcattccttcccacttcgctccggagacgccgggctccatccacgaaggcggcgagctgggctacgccctgtcgcacgcctacggcgcgatcatggacaacccgagcctcttcgtcccgtgcatcatcggtgacggcgaagccgagaccggccctctggccaccggctggcagtccaacaagctcgtcaacccgcgcaccgacggcatcgtcctgccgatcctgcacctcaacggctacaagatcgccaacccgacgatcctcgcccgcatctccgacgaggagctgcacgacttcttccgcggcatgggttaccacccgtacgagttcgtcgccggcttcgacaacgaggatcacctgtcgatccaccgtcgcttcgccgagctcttcgagaccatcttcgacgagatctgcgatatcaaggctgcggctcagaccgacgacatgacccgtccgttctacccgatgctcatcttccgcaccccgaagggctggacctgcccgaagttcatcgacggcaagaagaccgaaggctcctggcgtgcacaccaggtcccgctggcttccgcccgcgacaccgaggcccacttcgaagtcctcaagggctggatggaatcctacaagccggaggagctcttcaacgccgacggctccatcaaggaggacgtcaccgcattcatgcctaagggcgaactgcgcatcggcgccaacccgaatgccaacggcggccgcatccgcgaggatctgaagctccctgagctcgatcagtacgagatcaccggcgtcaaggaatacggccacggttggggccaggtcgaggctccgcgttccctcggcgcgtactgccgcgacatcatcaagaacaacccggattcgttccgcgtcttcggacctgacgagaccgcgtccaaccgtctgaacgcgacctacgaggtcaccaagaagcagtgggacaacggatacctctcggctctcgtcgacgagaacatggccgtcaccggccaggttgtcgagcagctctccgagcatcagtgcgaaggcttcctcgaggcctacctgctcaccggccgtcacggcatctggagctcctacgagtccttcgtgcacgtgatcgactccatgctgaaccagcatgcgaagtggctcgaggccaccgtccgcgagatcccgtggcgtaagccgatctcctcggtgaacctcctggtctcctcgcacgtgtggcgtcaggatcacaacggcttctcgcaccaggatccgggtgtgacctccgtcctgctgaacaagacgttcaacaacgaccacgtgacgaacatctacttcgcgaccgatgccaacatgctgctggccatcgccgagaagtgcttcaagtccaccaacaagatcaacgcaatcttcgccggcaagcagccggccgcgacgtggatcaccctcgacgaggtacgcgccgagctcgaggctggtgccgccgagtggaagtgggcttccaacgccaagagcaacgacgaggtccaggttgtcctcgccgccgccggcgacgtcccgacccaggagatcatggccgcttccgatgccctcaacaagatgggcatcaagttcaaggtcgtcaacgtcgtggacctcatcaagctgcagtcctcgaaggagaacgacgaggccatgtctgacgaggacttcgccgacctgttcaccgcggacaagccggtcctcttcgcctaccactcctatgcccaggacgttcgtggcctcatctacgaccgcccgaaccacgacaacttcaccgttgtcggatacaaggagcagggctccacgacgacgccgttcgacatggtgcgtgtcaacgacatggatcgctacgcccttcaggccaaggccctcgagctcatcgacgccgacaagtatgccgacaagatcaacgagctcaacgagttccgcaagaccgcgttccagttcgccgtcgacaatggctatgacattcctgagttcaccgattgggtgtacccggatgtcaaggtcgacgagacctccatgctctccgccaccgccgcgaccgccggcgacaacgagtga

SEQ ID NO: 214 - protein, 825 aa, Bifidobacterium lactis
MTNPVIGTPWQKLDRPVSEEAIEGMDKYWRVANYMSIGQIYLRSNPLMKEPFTRDDVKHRLVGHWGTTPGLNFLLAHINRLIADHQQNTVFIMGPGHGGPAGTAQSYIDGTYTEYYPNITKDEAGLQKFFRQFSYPGGIPSHFAPETPGSIHEGGELGYALSHAYGAIMDNPSLFVPCIIGDGEAETGPLATGWQSNKLVNPRTDGIVLPILHLNGYKIANPTILARISDEELHDFFRGMGYHPYEFVAGFDNEDHLSIHRRFAELFETIFDEICDIKAAAQTDDMTRPFYPMLIFRTPKGWTCPKFIDGKKTEGSWRAHQVPLASARDTEAHFEVLKGWMESYKPEELFNADGSIKEDVTAFMPKGELRIGANPNANGGRIREDLKLPELDQYEITGVKEYGHGWGQVEAPRSLGAYCRDIIKNNPDSFRVFGPDETASNRLNATYEVTKKQWDNGYLSALVDENMAVTGQVVEQLSEHQCEGFLEAYLLTGRHGIWSSYESFVHVIDSMLNQHAKWLEATVREIPWRKPISSVNLLVSSHVWRQDHNGFSHQDPGVTSVLLNKTFNNDHVTNIYFATDANMLLAIAEKCFKSTNKINAIFAGKQPAATWITLDEVRAELEAGAAEWKWASNAKSNDEVQVVLAAAGDVPTQEIMAASDALNKMGIKFKVVNVVDLIKLQSSKENDEAMSDEDFADLFTADKPVLFAYHSYAQDVRGLIYDRPNHDNFTVVGYKEQGSTTTPFDMVRVNDMDRYALQAKALELIDADKYADKINELNEFRKTAFQFAVDNGYDIPEFTDWVYPDVKVDETSMLSATAATAGDNE

SEQ ID NO: 215 - DNA, 2367 bp, Unknown
  Lactobacillus paraplantarum Sequence
  misc_feature (75)..(75): n is a, c, g, or t
atgacaacagattactcatcaccagcatatttgcaaaaagttgataagtactggcgggcagccaactacttatcngttgggcaactttatttaaaagattatccattattacaacagccattgaaggccagtgacgttaaggttcatccaatttgtcactgggggacgattgccggtcaaaactctatctacgcgcaccttaaccgggttattaacaagtacggtttgaagatgttctacgttgaaggtccaggtcatggtggtcaagtgatggtttcaaactcttatcttgacggtacttacaccgatatttatccagaaattacgcaggatgttgaaggaatgcagaaactcttcaagcaattctcattcccaggtggggttgcttcccatgcggcacctgaaacacctggttcaatccacgaaggtggcgaactaggttactcaatttcacacggggttggggcaattcttgacaatcctgacgaaattgcagcggtcgttgttggtgatggggaatccgaaacgggtccattagcaacttcatggcaatcaacgaagttcattaacccaatcaatgacggggcagtgttaccaatcttgaacttaaatggttttaagatttctaacccaacgatttttggtcggacttctgatgctaagattaaggaatacttcgaaagcatgagctgggaaccaatcttcgttgaaggtgacgatcctgaaaaggttcacccagtcttagctaaagccatggatgaagccgttgaaaagatcaaggcaatccagaagcatgctcgtgaaaatgacgatgcgacgttgccagtatggccaatgatcgttttccgtgcacctaagggctggactggtcctaagtcatgggacggcgataagattgaaggttcattccgggcccatcaaattccgattcctgttgatcaaaatgacatggaacatgcggacgctttagttgattggcttgaatcatatcaaccaaaggaactcttcaatgaagatggttctttgaaggatgatattaaagaaattattcctactggggacagtcggatggcagctaacccaatcaccaatggtggggttgatccgaaagccttgaacttaccaaacttccgggattatgcggtcgatacgtccaaggaaggcgcgaatgttaagcaagatatgcttgtttggtcagactatttgcgggatgtcatcaagaagaatcctgataacttccggttgttcggacctgatgaaaccatgtctaaccgcttatatggtgtcttcgaaaccactaatcgtcaatggatggaagacattcatcccgatagtgaccaatatgaagctgcagctggccgggtcttagatgctcagttatctgaacaccaagctgaaggttggttagaaggttacgtcttaactggacgtcatgggttatttgccagttatgaagccttcctacgcgttgtggactcaatgttgacgcaacacttcaagtggttacgtaaggccaatgaacttgattggcgtaaaaagtacccatcacttaacattatcgcggcttcaactgtattccaacaagaccataatggttacacccaccaagatccaggtgcgttgactcatttggccgaaaagaaaccagaatacattcgcgaatatttaccagccgatgccaacacgttattagctgtcggtgacgtcattttccggagccaagaaaagatcaactacgtggttacgtcaaaacacccacgtcaacaatggttcagcattgaagaagctaaacaattagttgacaatggtcttggtatcattgactgggcaagcacggatcaaggtagcgaaccagacatcgtctttgcagctgctgggacggaaccaacgcttgaaacgttggctgccatccaattactacacgacagtttcccagagatgaagattcgtttcgtgaacgtggtcgacatcttgaagttacgtagtcctgaaaaggatccacggggcttgtcagatgctgaatttgaccattactttactaaggacaaaccagtggtctttgctttccacggttacgaagatttagttcgtgacatcttcttcgatcgtcacaaccataacttatacgtccacggttaccgtgaaaatggtgatattaccacaccattcgacgtacgggtcatgaaccaaatggatcgtttcgacttagctaagacggcgattgcggcgcaaccagcaatggaaaacaccggtgcggcctttgttcaatccatggataacatgcttgctaaacacaatgcatacattcgggatgccggaaccgacttgccagaagttaacgactggcaatggaaaggtttgaaataa

SEQ ID NO: 216 - protein, 788 aa, Unknown
  Lactobacillus paraplantarum Sequence
MTTDYSSPAYLQKVDKYWRAANYLSVGQLYLKDYPLLQQPLKASDVKVHPICHWGTIAGQNSIYAHLNRVINKYGLKMFYVEGPGHGGQVMVSNSYLDGTYTDIYPEITQDVEGMQKLFKQFSFPGGVASHAAPETPGSIHEGGELGYSISHGVGAILDNPDEIAAVVVGDGESETGPLATSWQSTKFINPINDGAVLPILNLNGFKISNPTIFGRTSDAKIKEYFESMSWEPIFVEGDDPEKVHPVLAKAMDEAVEKIKAIQKHARENDDATLPVWPMIVFRAPKGWTGPKSWDGDKIEGSFRAHQIPIPVDQNDMEHADALVDWLESYQPKELFNEDGSLKDDIKEIIPTGDSRMAANPITNGGVDPKALNLPNFRDYAVDTSKEGANVKQDMLVWSDYLRDVIKKNPDNFRLFGPDETMSNRLYGVFETTNRQWMEDIHPDSDQYEAAAGRVLDAQLSEHQAEGWLEGYVLTGRHGLFASYEAFLRVVDSMLTQHFKWLRKANELDWRKKYPSLNIIAASTVFQQDHNGYTHQDPGALTHLAEKKPEYIREYLPADANTLLAVGDVIFRSQEKINYVVTSKHPRQQWFSIEEAKQLVDNGLGIIDWASTDQGSEPDIVFAAAGTEPTLETLAAIQLLHDSFPEMKIRFVNVVDILKLRSPEKDPRGLSDAEFDHYFTKDKPVVFAFHGYEDLVRDIFFDRHNHNLYVHGYRENGDITTPFDVRVMNQMDRFDLAKTAIAAQPAMENTGAAFVQSMDNMLAKHNAYIRDAGTDLPEVNDWQWKGLK

SEQ ID NO: 217 - DNA, 2478 bp, Bifidobacterium breve
atgacaaatcctgttattggcaccccgtggcagaagctggatcgcccggtttccgaagaagccatcgaaggcatggacaagtattggcgcgtcaccaactacatgtccatcggccagatctatctgcgtagcaacccgctgatgaaggaacccttcacccgcgatgacgtgaagcaccgtctggtcggccactggggcaccaccccgggcctgaacttccttctcgcccacatcaaccgcctcatcgctgaccaccagcagaacaccgtgttcatcatgggcccgggccacggcggcccggctggcacctcccagtcttacgttgacggcacgtacaccgagtactacccgaacatcaccaaggacgaagctggcctgcagaagttcttccgccagttctcctacccgggcggcatcccgtcgcacttcgccccggagaccccgggatcgatccacgaaggtggcgagcttggctacgcgctctcccacgcatacggcgccgtgatgaacaacccgagcctgttcgtgccgtgcatcatcggcgacggcgaggccgagaccggcccgctcgccaccggctggcagtccaacaagctcgtcaacccgcgcaccgacggcatcgtgctgccgatcctgcacctcaacggctacaagatcgccaacccgaccatcctcgctcgtatctccgacgaagagctgcatgacttcttccgcggcatgggctaccacccgtacgagttcgttgccggcttcgacaacgaggaccacatgtcgatccaccgtcgtttcgccgagctgttcgagacgatcttcgacgagatctgcgacatcaaggctgcggcccagaccgacgacatgacccgtccgttctacccgatgctcatcttccgcaccccgaagggctggacctgcccgaagttcatcgacggcaagaagaccgaaggctcctggcgtgcgcaccaggtcccgctggcttccgcccgcgacaccgaagagcacttcgaagtcctcaagggctggatggaatcctacaagccggaagagctcttcaacgccgacggctccatcaaggatgacgtcaccgcgttcatgccgaagggcgagctccgcatcggcgccaacccgaacgccaacggtggtgtgatccgcgaggacctgaagctccccgagctcgaccagtacgaggtcaccggcgtcaaggagtacggccatggctggggccaggtcgaggctccgcgtgccctcggtgcatactgccgcgacatcatcaagaacaacccggattcgttccgcatcttcggaccggacgagaccgcttccaaccgcctgaacgcgacctacgaggtcaccgacaagcagtgggacaacggctacctttcgggtctcgtcgacgagcacatggcggtcaccggtcaggtcaccgagcagctctccgagcaccagtgcgagggcttcctcgaggcgtacctcctcaccggccgccacggcatctggagctcctacgagtccttcgtccacgtcatcgactcgatgctcaaccagcatgcgaagtggctcgaggccaccgtccgcgagatcccgtggcgcaagccgatctcctcggtgaacctcctcgtctcctcgcacgtgtggcgtcaggatcacaacggcttctcgcaccaggatccgggtgtcacctcgctcctgatcaacaagacgttcaacaacgatcacgtgacgaacatctacttcgcgaccgacgcgaacatgctgctcgcgatctccgagaagtgcttcaagtccaccaacaagatcaatgcgatcttcgccggcaagcagcctgctccgacgtgggtcacgctcgatgaggcccgcgccgagctcgaagccggcgccgctgagtggaagtgggcttccaacgccgagaacaacgatgaggtccaggtcgtcctcgcttccgctggcgatgtgccgacccaggagctcatggccgcctccgatgccctcaacaagatgggcatcaagttcaaggtcgtcaacgttgttgacctcctgaagctgcagtcccgcgagaacaacgacgaggccctcacggacgaggagttcaccgaactcttcaccgccgacaagccggttctgttcgcataccactcctacgctcaggatgttcgcggcctcatctacgaccgcccgaaccacgacaacttccacgtcgtcggctacaaggagcagggctccacgaccacgccgttcgacatggtccgcgtcaacgacatggatcgctatgcgctccaggccgctgccctcaagctgatcgatgccgacaagtacgccgacaagatcgacgagctcaacgcgttccgcaagaaggcgttccagttcgctgtcgacaacggctacgacatcccggagttcaccgactgggtgtacccggatgtcaaggtcgacgagacgcagatgctttccgcgaccgcggcgaccgcaggcgacaacgagtga

SEQ ID NO: 218 - protein, 825 aa, Bifidobacterium breve
MTNPVIGTPWQKLDRPVSEEAIEGMDKYWRVTNYMSIGQIYLRSNPLMKEPFTRDDVKHRLVGHWGTTPGLNFLLAHINRLIADHQQNTVFIMGPGHGGPAGTSQSYVDGTYTEYYPNITKDEAGLQKFFRQFSYPGGIPSHFAPETPGSIHEGGELGYALSHAYGAVMNNPSLFVPCIIGDGEAETGPLATGWQSNKLVNPRTDGIVLPILHLNGYKIANPTILARISDEELHDFFRGMGYHPYEFVAGFDNEDHMSIHRRFAELFETIFDEICDIKAAAQTDDMTRPFYPMLIFRTPKGWTCPKFIDGKKTEGSWRAHQVPLASARDTEEHFEVLKGWMESYKPEELFNADGSIKDDVTAFMPKGELRIGANPNANGGVIREDLKLPELDQYEVTGVKEYGHGWGQVEAPRALGAYCRDIIKNNPDSFRIFGPDETASNRLNATYEVTDKQWDNGYLSGLVDEHMAVTGQVTEQLSEHQCEGFLEAYLLTGRHGIWSSYESFVHVIDSMLNQHAKWLEATVREIPWRKPISSVNLLVSSHVWRQDHNGFSHQDPGVTSLLINKTFNNDHVTNIYFATDANMLLAISEKCFKSTNKINAIFAGKQPAPTWVTLDEARAELEAGAAEWKWASNAENNDEVQVVLASAGDVPTQELMAASDALNKMGIKFKVVNVVDLLKLQSRENNDEALTDEEFTELFTADKPVLFAYHSYAQDVRGLIYDRPNHDNFHVVGYKEQGSTTTPFDMVRVNDMDRYALQAAALKLIDADKYADKIDELNAFRKKAFQFAVDNGYDIPEFTDWVYPDVKVDETQMLSATAATAGDNE

SEQ ID NO: 219 - DNA, 2145 bp, Escherichia coli
gtgtcccgtattattatgctgatccctaccggaaccagcgtcggtctgaccagcgtcagccttggcgtgatccgtgcaatggaacgcaaaggcgttcgtctgagcgttttcaaacctatcgctcagccgcgtaccggtggcgatgcgcccgatcagactacgactatcgtgcgtgcgaactcttccaccacgacggccgctgaaccgctgaaaatgagctacgttgaaggtctgctttccagcaatcagaaagatgtgctgatggaagagatcgtcgcaaactaccacgctaacaccaaagacgctgaagtcgttctggttgaaggtctggtcccgacacgtaagcaccagtttgcccagtctctgaactacgaaatcgctaaaacgctgaatgcggaaatcgtcttcgttatgtctcagggcactgacaccccggaacagctgaaagagcgtatcgaactgacccgcaacagcttcggcggtgccaaaaacaccaacatcaccggcgttatcgttaacaaactgaacgcaccggttgatgaacagggtcgtactcgcccggatctgtccgagattttcgacgactcttccaaagctaaagtaaacaatgttgatccggcgaagctgcaagaatccagcccgctgccggttctcggcgctgtgccgtggagctttgacctgatcgcgactcgtgcgatcgatatggctcgccacctgaatgcgaccatcatcaacgaaggcgacatcaatactcgccgcgttaaatccgtcactttctgcgcacgcagcattccgcacatgctggagcacttccgtgccggttctctgctggtgacttccgcagaccgtcctgacgtgctggtggccgcttgcctggcagccatgaacggcgtagaaatcggtgccctgctgctgactggcggttacgaaatggacgcgcgcatttctaaactgtgcgaacgtgctttcgctaccggcctgccggtatttatggtgaacaccaacacctggcagacctctctgagcctgcagagcttcaacctggaagttccggttgacgatcacgaacgtatcgagaaagttcaggaatacgttgctaactacatcaacgctgactggatcgaatctctgactgccacttctgagcgcagccgtcgtctgtctccgcctgcgttccgttatcagctgactgaacttgcgcgcaaagcgggcaaacgtatcgtactgccggaaggtgacgaaccgcgtaccgttaaagcagccgctatctgtgctgaacgtggtatcgcaacttgcgtactgctgggtaatccggcagagatcaaccgtgttgcagcgtctcagggtgtagaactgggtgcagggattgaaatcgttgatccagaagtggttcgcgaaagctatgttggtcgtctggtcgaactgcgtaagaacaaaggcatgaccgaaaccgttgcccgcgaacagctggaagacaacgtggtgctcggtacgctgatgctggaacaggatgaagttgatggtctggtttccggtgctgttcacactaccgcaaacaccatccgtccgccgctgcagctgatcaaaactgcaccgggcagctccctggtatcttccgtgttcttcatgctgctgccggaacaggtttacgtttacggtgactgtgcgatcaacccggatccgaccgctgaacagctggcagaaatcgcgattcagtccgctgattccgctgcggccttcggtatcgaaccgcgcgttgctatgctctcctactccaccggtacttctggtgcaggtagcgacgtagaaaaagttcgcgaagcaactcgtctggcgcaggaaaaacgtcctgacctgatgatcgacggtccgctgcagtacgacgctgcggtaatggctgacgttgcgaaatccaaagcgccgaactctccggttgcaggtcgcgctaccgtgttcatcttcccggatctgaacaccggtaacaccacctacaaagcggtacagcgttctgccgacctgatctccatcgggccgatgctgcagggtatgcgcaagccggttaacgacctgtcccgtggcgcactggttgacgatatcgtctacaccatcgcgctgactgcgattcagtctgcacagcagcagtaa

SEQ ID NO: 220 - protein, 714 aa, Escherichia coli
MSRIIMLIPTGTSVGLTSVSLGVIRAMERKGVRLSVFKPIAQPRTGGDAPDQTTTIVRANSSTTTAAEPLKMSYVEGLLSSNQKDVLMEEIVANYHANTKDAEVVLVEGLVPTRKHQFAQSLNYEIAKTLNAEIVFVMSQGTDTPEQLKERIELTRNSFGGAKNTNITGVIVNKLNAPVDEQGRTRPDLSEIFDDSSKAKVNNVDPAKLQESSPLPVLGAVPWSFDLIATRAIDMARHLNATIINEGDINTRRVKSVTFCARSIPHMLEHFRAGSLLVTSADRPDVLVAACLAAMNGVEIGALLLTGGYEMDARISKLCERAFATGLPVFMVNTNTWQTSLSLQSFNLEVPVDDHERIEKVQEYVANYINADWIESLTATSERSRRLSPPAFRYQLTELARKAGKRIVLPEGDEPRTVKAAAICAERGIATCVLLGNPAEINRVAASQGVELGAGIEIVDPEVVRESYVGRLVELRKNKGMTETVAREQLEDNVVLGTLMLEQDEVDGLVSGAVHTTANTIRPPLQLIKTAPGSSLVSSVFFMLLPEQVYVYGDCAINPDPTAEQLAEIAIQSADSAAAFGIEPRVAMLSYSTGTSGAGSDVEKVREATRLAQEKRPDLMIDGPLQYDAAVMADVAKSKAPNSPVAGRATVFIFPDLNTGNTTYKAVQRSADLISIGPMLQGMRKPVNDLSRGALVDDIVYTIALTAIQSAQQQ

SEQ ID NO: 221 - DNA, 1002 bp, Clostridium acetobutylicum
atggatttaatagaaagcatatgggagtgtgctaagcaagacaaaaaaaggataatattagctgaaggtgaagaaaaaagaaatctaattgccgcagataaaattatcaaagagggattagcagagcttgttcttgtaggtgatgaaaataaaattaaagaaaaagcaagtgagttgaatcttgacatttcgaaggctgaaataatggatccagagacatcactaaaaacagaaacatatgctagagatttttatgaacttagaaaacacaaaggaatgactattgaaaaatctgaaaaaatggtaagagatcctctttattttgcaacaatggctttaaaagatggctatgttgatggaatggtttcaggagctgttcacacaactggagatttattaagaccaggacttcaaattataaaaactgcaccaggagttaaaatagtatcaggattctttgttatgataatacctgactgcgattatggtgaagagggtcttttattatttgcagattgtgctgtaaatcctaacccaacatcagatgaactagctgatattgctataactacagctgaaacagctagaaaattatgtaacgtagagcctaaagttgcgatgctttcattctcaactatgggaagtgcaaaaggcgaaatggtagataaggttaaaaatgctgttgaaatcacaaagaaattcagaccggatcttgctattgatggtgagcttcagcttgatgctgcaatagatagtgaagtagcggctttaaaagcaccttctagtaatgttgcaggaaatgcaaatgttcttgtattcccagatcttcaaacaggaaacattgggtacaagcttgttcaaagatttgcaaaagcaaaagcaataggacctatatgtcaaggatttgcaaaacctattaatgatttatcaagaggctgtagctcagaggatatagtaaatgttgttgctataactgttgttcaggctcaaagaggtatataa

SEQ ID NO: 222 - protein, 333 aa, Clostridium acetobutylicum
MDLIESIWECAKQDKKRIILAEGEEKRNLIAADKIIKEGLAELVLVGDENKIKEKASELNLDISKAEIMDPETSLKTETYARDFYELRKHKGMTIEKSEKMVRDPLYFATMALKDGYVDGMVSGAVHTTGDLLRPGLQIIKTAPGVKIVSGFFVMIIPDCDYGEEGLLLFADCAVNPNPTSDELADIAITTAETARKLCNVEPKVAMLSFSTMGSAKGEMVDKVKNAVEITKKFRPDLAIDGELQLDAAIDSEVAALKAPSSNVAGNANVLVFPDLQTGNIGYKLVQRFAKAKAIGPICQGFAKPINDLSRGCSSEDIVNVVAITVVQAQRGI

SEQ ID NO: 223 - DNA, 1647 bp, Lactococcus lactis
atgtatacagtaggagattacctattagaccgattacacgagttaggaattgaagaaatttttggagtccctggagactataacttacaatttttagatcaaattatttcccacaaggatatgaaatgggtcggaaatgctaatgaattaaatgcttcatatatggctgatggctatgctcgtactaaaaaagctgccgcatttcttacaacctttggagtaggtgaattgagtgcagttaatggattagcaggaagttacgccgaaaatttaccagtagtagaaatagtgggatcacctacatcaaaagttcaaaatgaaggaaaatttgttcatcatacgctggctgacggtgattttaaacactttatgaaaatgcacgaacctgttacagcagctcgaactttactgacagcagaaaatgcaaccgttgaaattgaccgagtactttctgcactattaaaagaaagaaaacctgtctatatcaacttaccagttgatgttgctgctgcaaaagcagagaaaccctcactccctttgaaaaaggaaaactcaacttcaaatacaagtgaccaagaaattttgaacaaaattcaagaaagcttgaaaaatgccaaaaaaccaatcgtgattacaggacatgaaataattagttttggcttagaaaaaacagtcactcaatttatttcaaagacaaaactacctattacgacattaaactttggtaaaagttcagttgatgaagccctcccttcatttttaggaatctataatggtacactctcagagcctaatcttaaagaattcgtggaatcagccgacttcatcttgatgcttggagttaaactcacagactcttcaacaggagccttcactcatcatttaaatgaaaataaaatgatttcactgaatatagatgaaggaaaaatatttaacgaaagaatccaaaattttgattttgaatccctcatctcctctctcttagacctaagcgaaatagaatacaaaggaaaatatatcgataaaaagcaagaagactttgttccatcaaatgcgcttttatcacaagaccgcctatggcaagcagttgaaaacctaactcaaagcaatgaaacaatcgttgctgaacaagggacatcattctttggcgcttcatcaattttcttaaaatcaaagagtcattttattggtcaacccttatggggatcaattggatatacattcccagcagcattaggaagccaaattgcagataaagaaagcagacaccttttatttattggtgatggttcacttcaacttacagtgcaagaattaggattagcaatcagagaaaaaattaatccaatttgctttattatcaataatgatggttatacagtcgaaagagaaattcatggaccaaatcaaagctacaatgatattccaatgtggaattactcaaaattaccagaatcgtttggagcaacagaagatcgagtagtctcaaaaatcgttagaactgaaaatgaatttgtgtctgtcatgaaagaagctcaagcagatccaaatagaatgtactggattgagttaattttggcaaaagaaggtgcaccaaaagtactgaaaaaaatgggcaaactatttgctgaacaaaataaatcataa

SEQ ID NO: 224 - protein, 548 aa, Lactococcus lactis
MYTVGDYLLDRLHELGIEEIFGVPGDYNLQFLDQIISHKDMKWVGNANELNASYMADGYARTKKAAAFLTTFGVGELSAVNGLAGSYAENLPVVEIVGSPTSKVQNEGKFVHHTLADGDFKHFMKMHEPVTAARTLLTAENATVEIDRVLSALLKERKPVYINLPVDVAAAKAEKPSLPLKKENSTSNTSDQEILNKIQESLKNAKKPIVITGHEIISFGLEKTVTQFISKTKLPITTLNFGKSSVDEALPSFLGIYNGTLSEPNLKEFVESADFILMLGVKLTDSSTGAFTHHLNENKMISLNIDEGKIFNERIQNFDFESLISSLLDLSEIEYKGKYIDKKQEDFVPSNALLSQDRLWQAVENLTQSNETIVAEQGTSFFGASSIFLKSKSHFIGQPLWGSIGYTFPAALGSQIADKESRHLLFIGDGSLQLTVQELGLAIREKINPICFIINNDGYTVEREIHGPNQSYNDIPMWNYSKLPESFGATEDRVVSKIVRTENEFVSVMKEAQADPNRMYWIELILAKEGAPKVLKKMGKLFAEQNKS

SEQ ID NO: 225 - DNA, 2802 bp, Escherichia coli
atgcagaacagcgctttgaaagcctggttggactcttcttacctctctggcgcaaaccagagctggatagaacagctctatgaagacttcttaaccgatcctgactcggttgacgctaactggcgttcgacgttccagcagttacctggtacgggagtcaaaccggatcaattccactctcaaacgcgtgaatatttccgccgcctggcgaaagacgcttcacgttactcttcaacgatctccgaccctgacaccaatgtgaagcaggttaaagtcctgcagctcattaacgcataccgcttccgtggtcaccagcatgcgaatctcgatccgctgggactgtggcagcaagataaagtggccgatctggatccgtctttccacgatctgaccgaagcagacttccaggagaccttcaacgtcggttcatttgccagcggcaaagaaaccatgaaactcggcgagctgctggaagccctcaagcaaacctactgcggcccgattggtgccgagtatatgcacattaccagcaccgaagaaaaacgctggatccaacagcgtatcgagtctggtcgcgcgactttcaatagcgaagagaaaaaacgcttcttaagcgaactgaccgccgctgaaggtcttgaacgttacctcggcgcaaaattccctggcgcaaaacgcttctcgctggaaggcggtgacgcgttaatcccgatgcttaaagagatgatccgccacgctggcaacagcggcacccgcgaagtggttctcgggatggcgcaccgtggtcgtctgaacgtgctggtgaacgtgctgggtaaaaaaccgcaagacttgttcgacgagttcgccggtaaacataaagaacacctcggcacgggtgacgtgaaataccacatgggcttctcgtctgacttccagaccgatggcggcctggtgcacctggcgctggcgtttaacccgtctcaccttgagattgtaagcccggtagttatcggttctgttcgtgcccgtctggacagacttgatgagccgagcagcaacaaagtgctgccaatcaccatccacggtgacgccgcagtgaccgggcagggcgtggttcaggaaaccctgaacatgtcgaaagcgcgtggttatgaagttggcggtacggtacgtatcgttatcaacaaccaggttggtttcaccacctctaatccgctggatgcccgttctacgccgtactgtactgatatcggtaagatggttcaggccccgattttccacgttaacgcggacgatccggaagccgttgcctttgtgacccgtctggcgctcgatttccgtaacacctttaaacgtgatgtcttcatcgacctggtgtgctaccgccgtcacggccacaacgaagccgacgagccgagcgcaacccagccgctgatgtatcagaaaatcaaaaaacatccgacaccgcgcaaaatctacgctgacaagctggagcaggaaaaagtggcgacgctggaagatgccaccgagatggttaacctgtaccgcgatgcgctggatgctggcgattgcgtagtggcagagtggcgtccgatgaacatgcactctttcacctggtcgccgtacctcaaccacgaatgggacgaagagtacccgaacaaagttgagatgaagcgcctgcaggagctggcgaaacgcatcagcacggtgccggaagcagttgaaatgcagtctcgcgttgccaagatttatggcgatcgccaggcgatggctgccggtgagaaactgttcgactggggcggtgcggaaaacctcgcttacgccacgctggttgatgaaggcattccggttcgcctgtcgggtgaagactccggtcgcggtaccttcttccaccgccacgcggtgatccacaaccagtctaacggttccacttacacgccgctgcaacatatccataacgggcagggcgcgttccgtgtctgggactccgtactgtctgaagaagcagtgctggcgtttgaatatggttatgccaccgcagaaccacgcactctgaccatctgggaagcgcagttcggtgacttcgccaacggtgcgcaggtggttatcgaccagttcatctcctctggcgaacagaaatggggccggatgtgtggtctggtgatgttgctgccgcacggttacgaagggcaggggccggagcactcctccgcgcgtctggaacgttatctgcaactttgtgctgagcaaaacatgcaggtttgcgtaccgtctaccccggcacaggtttaccacatgctgcgtcgtcaggcgctgcgcgggatgcgtcgtccgctggtcgtgatgtcgccgaaatccctgctgcgtcatccgctggcggtttccagcctcgaagaactggcgaacggcaccttcctgccagccatcggtgaaatcgacgagcttgatccgaagggcgtgaagcgcgtagtgatgtgttctggtaaggtttattacgacctgctggaacagcgtcgtaagaacaatcaacacgatgtcgccattgtgcgtatcgagcaactctacccgttcccgcataaagcgatgcaggaagtgttgcagcagtttgctcacgtcaaggattttgtctggtgccaggaagagccgctcaaccagggcgcatggtactgcagccagcatcatttccgtgaagtgattccgtttggggcttctctgcgttatgcaggccgcccggcctccgcctctccggcggtagggtatatgtccgttcaccagaaacagcaacaagatctggttaatgacgcgctgaacgtcgaataa

SEQ ID NO: 226 - protein, 933 aa, Escherichia coli
MQNSALKAWLDSSYLSGANQSWIEQLYEDFLTDPDSVDANWRSTFQQLPGTGVKPDQFHSQTREYFRRLAKDASRYSSTISDPDTNVKQVKVLQLINAYRFRGHQHANLDPLGLWQQDKVADLDPSFHDLTEADFQETFNVGSFASGKETMKLGELLEALKQTYCGPIGAEYMHITSTEEKRWIQQRIESGRATFNSEEKKRFLSELTAAEGLERYLGAKFPGAKRFSLEGGDALIPMLKEMIRHAGNSGTREVVLGMAHRGRLNVLVNVLGKKPQDLFDEFAGKHKEHLGTGDVKYHMGFSSDFQTDGGLVHLALAFNPSHLEIVSPVVIGSVRARLDRLDEPSSNKVLPITIHGDAAVTGQGVVQETLNMSKARGYEVGGTVRIVINNQVGFTTSNPLDARSTPYCTDIGKMVQAPIFHVNADDPEAVAFVTRLALDFRNTFKRDVFIDLVCYRRHGHNEADEPSATQPLMYQKIKKHPTPRKIYADKLEQEKVATLEDATEMVNLYRDALDAGDCVVAEWRPMNMHSFTWSPYLNHEWDEEYPNKVEMKRLQELAKRISTVPEAVEMQSRVAKIYGDRQAMAAGEKLFDWGGAENLAYATLVDEGIPVRLSGEDSGRGTFFHRHAVIHNQSNGSTYTPLQHIHNGQGAFRVWDSVLSEEAVLAFEYGYATAEPRTLTIWEAQFGDFANGAQVVIDQFISSGEQKWGRMCGLVMLLPHGYEGQGPEHSSARLERYLQLCAEQNMQVCVPSTPAQVYHMLRRQALRGMRRPLVVMSPKSLLRHPLAVSSLEELANGTFLPAIGEIDELDPKGVKRVVMCSGKVYYDLLEQRRKNNQHDVAIVRIEQLYPFPHKAMQEVLQQFAHVKDFVWCQEEPLNQGAWYCSQHHFREVIPFGASLRYAGRPASASPAVGYMSVHQKQQQDLVNDALNVE

SEQ ID NO: 227 - DNA, 1233 bp, Escherichia coli
atggcaaaggtatcgctggagaaagacaagattaagtttctgctggtagaaggcgtgcaccaaaaggcgctggaaagccttcgtgcagctggttacaccaacatcgaatttcacaaaggcgcgctggatgatgaacaattaaaagaatccatccgcgatgcccacttcatcggcctgcgatcccgtacccatctgactgaagacgtgatcaacgccgcagaaaaactggtcgctattggctgtttctgtatcggaacaaaccaggttgatctggatgcggcggcaaagcgcgggatcccggtatttaacgcaccgttctcaaatacgcgctctgttgcggagctggtgattggcgaactgctgctgctattgcgcggcgtgccggaagccaatgctaaagcgcaccgtggcgtgtggaacaaactggcggcgggttcttttgaagcgcgcggcaaaaagctgggtatcatcggctacggtcatattggtacgcaattgggcattctggctgaatcgctgggaatgtatgtttacttttatgatattgaaaataaactgccgctgggcaacgccactcaggtacagcatctttctgacctgctgaatatgagcgatgtggtgagtctgcatgtaccagagaatccgtccaccaaaaatatgatgggcgcgaaagaaatttcactaatgaagcccggctcgctgctgattaatgcttcgcgcggtactgtggtggatattccggcgctgtgtgatgcgctggcgagcaaacatctggcgggggcggcaatcgacgtattcccgacggaaccggcgaccaatagcgatccatttacctctccgctgtgtgaattcgacaacgtccttctgacgccacacattggcggttcgactcaggaagcgcaggagaatatcggcctggaagttgcgggtaaattgatcaagtattctgacaatggctcaacgctctctgcggtgaacttcccggaagtctcgctgccactgcacggtgggcgtcgtctgatgcacatccacgaaaaccgtccgggcgtgctaactgcgctgaacaaaatcttcgccgagcagggcgtcaacatcgccgcgcaatatctgcaaacttccgcccagatgggttatgtggttattgatattgaagccgacgaagacgttgccgaaaaagcgctgcaggcaatgaaagctattccgggtaccattcgcgcccgtctgctgtactaa

SEQ ID NO: 228 - protein, 410 aa, Escherichia coli
MAKVSLEKDKIKFLLVEGVHQKALESLRAAGYTNIEFHKGALDDEQLKESIRDAHFIGLRSRTHLTEDVINAAEKLVAIGCFCIGTNQVDLDAAAKRGIPVFNAPFSNTRSVAELVIGELLLLLRGVPEANAKAHRGVWNKLAAGSFEARGKKLGIIGYGHIGTQLGILAESLGMYVYFYDIENKLPLGNATQVQHLSDLLNMSDVVSLHVPENPSTKNMMGAKEISLMKPGSLLINASRGTVVDIPALCDALASKHLAGAAIDVFPTEPATNSDPFTSPLCEFDNVLLTPHIGGSTQEAQENIGLEVAGKLIKYSDNGSTLSAVNFPEVSLPLHGGRRLMHIHENRPGVLTALNKIFAEQGVNIAAQYLQTSAQMGYVVIDIEADEDVAEKALQAMKAIPGTIRARLLY

SEQ ID NO: 229 - DNA, 1089 bp, Escherichia coli
atggctcaaatcttcaattttagttctggtccggcaatgctaccggcagaggtgcttaaacaggctcaacaggaactgcgcgactggaacggtcttggtacgtcggtgatggaagtgagtcaccgtggcaaagagttcattcaggttgcagaggaagccgagaaggattttcgcgatcttcttaatgtcccctccaactacaaggtattattctgccatggcggtggtcgcggtcagtttgctgcggtaccgctgaatattctcggtgataaaaccaccgcagattatgttgatgccggttactgggcggcaagtgccattaaagaagcgaaaaaatactgcacgcctaatgtctttgacgccaaagtgactgttgatggtctgcgcgcggttaagccaatgcgtgaatggcaactctctgataatgctgcttatatgcattattgcccgaatgaaaccatcgatggtatcgccatcgacgaaacgccagacttcggcgcagatgtggtggtcgccgctgacttctcttcaaccattctttcccgtccgattgacgtcagccgttatggtgtaatttacgctggcgcgcagaaaaatatcggcccggctggcctgacaatcgtcatcgttcgtgaagatttgctgggcaaagcgaatatcgcgtgtccgtcgattctggattattccatcctcaacgataacggctccatgtttaacacgccgccgacatttgcctggtatctatctggtctggtctttaaatggctgaaagcgaacggcggtgtagctgaaatggataaaatcaatcagcaaaaagcagaactgctatatggggtgattgataacagcgatttctaccgcaatgacgtggcgaaagctaaccgttcgcggatgaacgtgccgttccagttggcggacagtgcgcttgacaaattgttccttgaagagtcttttgctgctggccttcatgcactgaaaggtcaccgtgtggtcggcggaatgcgcgcttctatttataacgccatgccgctggaaggcgttaaagcgctgacagacttcatggttgagttcgaacgccgtcacggttaa

SEQ ID NO: 230 - protein, 362 aa, Escherichia coli
MAQIFNFSSGPAMLPAEVLKQAQQELRDWNGLGTSVMEVSHRGKEFIQVAEEAEKDFRDLLNVPSNYKVLFCHGGGRGQFAAVPLNILGDKTTADYVDAGYWAASAIKEAKKYCTPNVFDAKVTVDGLRAVKPMREWQLSDNAAYMHYCPNETIDGIAIDETPDFGADVVVAADFSSTILSRPIDVSRYGVIYAGAQKNIGPAGLTIVIVREDLLGKANIACPSILDYSILNDNGSMFNTPPTFAWYLSGLVFKWLKANGGVAEMDKINQQKAELLYGVIDNSDFYRNDVAKANRSRMNVPFQLADSALDKLFLEESFAAGLHALKGHRVVGGMRASIYNAMPLEGVKALTDFMVEFERRHG

SEQ ID NO: 231 - DNA, 579 bp, Escherichia coli
gtggaataccgtagcctgacgcttgatgattttttatcgcgctttcaacttttgcgcccgcaaattaaccgggaaaccctaaatcatcgtcaggctgctgtgttaatccccatcgtccgtcgaccgcaaccggggttgttgctgactcagcgttcgattcatctgcgtaaacacgctggacaagtggcattccctggaggtgcagtcgatgacacggacgcatcagctatcgccgccgcgctgcgcgaagctgaagaagaggtcgctataccgccttccgccgttgaagttatcggcgtgctgccgcccgtcgatagcgtcactggctaccaggtaaccccagtggtcggcattatcccgcccgatctgccgtatcgcgccagtgaagatgaagtctcggcggtgtttgaaatgccgctcgcccaggcattacatctgggtcgttatcaccctttagatatctaccgccgtggtgattcacatcgggtatggctgtcctggtacgaacagtattttgtatggggaatgaccgcaggcataattcgtgagctggcgctgcaaattggtgtgaaaccctga

SEQ ID NO: 232 - protein, 192 aa, Escherichia coli
MEYRSLTLDDFLSRFQLLRPQINRETLNHRQAAVLIPIVRRPQPGLLLTQRSIHLRKHAGQVAFPGGAVDDTDASAIAAALREAEEEVAIPPSAVEVIGVLPPVDSVTGYQVTPVVGIIPPDLPYRASEDEVSAVFEMPLAQALHLGRYHPLDIYRRGDSHRVWLSWYEQYFVWGMTAGIIRELALQIGVKP

SEQ ID NO: 233 - DNA, 969 bp, Escherichia coli
atgcctaacattacctggtgcgacctgcctgaagatgtctctttatggccgggtctgcctctttcattaagtggtgatgaagtgatgccactggattaccacgcaggtcgtagcggctggctgctgtatggtcgtgggctggataaacaacgtctgacccaataccagagcaaactgggtgcggcgatggtgattgttgccgcctggtgcgtggaagattatcaggtgattcgtctggcaggttcactcaccgcacgggctacacgcctggcccacgaagcgcagctggatgtcgccccgctggggaaaatcccgcacctgcgcacgccgggtttgctggtgatggatatggactccaccgccatccagattgaatgtattgatgaaattgccaaactggccggaacgggcgagatggtggcggaagtaaccgaacgggcgatgcgcggcgaactcgattttaccgccagcctgcgcagccgtgtggcgacgctgaaaggcgctgacgccaatattctgcaacaggtgcgtgaaaatctgccgctgatgccaggcttaacgcaactggtgctcaagctggaaacgctgggctggaaagtggcgattgcctccggcggctttactttctttgctgaatacctgcgcgacaagctgcgcctgaccgccgtggtagccaatgaactggagatcatggacggtaaatttaccggcaatgtgatcggcgacatcgtagacgcgcagtacaaagcgaaaactctgactcgcctcgcgcaggagtatgaaatcccgctggcgcagaccgtggcgattggcgatggagccaatgacctgccgatgatcaaagcggcagggctggggattgcctaccatgccaagccaaaagtgaatgaaaaggcggaagtcaccatccgtcacgctgacctgatgggggtattctgcatcctctcaggcagcctgaatcagaagtaa

SEQ ID NO: 234 - protein, 322 aa, Escherichia coli [sequence omitted]

SEQ ID NO: 235 - DNA, 2233 bp, Arabidopsis thaliana
cgaaagggcaaaaaccaaaaagagaatcaaattttgcctcttctatataaatcaaatcaacgacgaagcgtcgctctcgttttctgtgtgtctctctctttgtcccaccattttcaccgcttctcctccaatcactcagatctacagattcctttaaaacaacaatggttggatctttggaatctgatcaaactctttcaatggccaccttaatcgaaaaactcgacatcttatctgacgacttcgatccaaccgccgtagtcaccgaaccgttacctcctccggtaactaatggaatcggagctgataaaggaggaggaggaggagaaagagagatggttctcggtaggaatatacacacaacgtcactcgctgtaacggaaccggaggttaacgatgaattcaccggagataaagaagcttatatggctagtgttcttgctcgttaccggaaaactttggttgaacgaaccaaaaaccatttaggtaaaatttgatctgatctgatctttttttttgaatcggaatcggaatctgaatcggaatctggtgtaggttatccttataacttggatttcgactatggtgcgcttggtcagttacaacatttttcgattaataatcttggagatccgtttattgaaagtaactatggtgtacactcaagaccttttgaagttggtgtgttggattggtttgctcgtctttgggagattgagagagatgattattggggttacattaccaattgtggtactgaaggcaaccttcatggcattttagtcgggtacgtttttcgaaaatcatcggtgttttgattcattcgaaaaaccgaaaaaaaacggtgtttgatttgatgtgtgtttgtaggagggagatgtttccggatgggatattgtatgcgtcgcgtgaatcgcattactcggtgtttaaagctgctcgaatgtatcgaatggagtgtgagaaggttgatacgcttatgtcaggggagattgattgtgatgatttgaggaagaagttgttggctaataaagataaaccggcgattcttaatgttaacataggttggtttatgttttagtactttggctttgtttgttgtgttaggattggtgctaatggttgaaatcttgttttctttaggaacgacggttaaaggagctgttgatgatcttgaccttgttatcaaaactcttgaagagtgtggtttctcacatgataggttctatattcattgtgatggagctttgtttggacttatgatgccttttgtcaaacgtgtaagtgtatagtcttcagtctaagcgaaatcgttatgataatctttgttctgctctgagatttgttgttttatctcctctgtaggcaccgaaagtgacgtttaataaaccgatagggagtgtgagtgtatcgggccacaaatttgtcgggtgtccaatgccatgtggtgttcagataacaagaatggaacatatcaaagtcctctccagtaacgttgagtaccttgcttcaagggatgcaacaatcatgggaagtcgtaacgggcatgctcctttgttcctctggtacaccttaaacaggaaaggttacaaaggattccagaaagaagttcagaaatgcttgagaaacgcgcattacctcaaagaccgacttcgtgaagctgggattagcgccatgcttaatgagcttagcagcactgtggtctttgaacggcctaaagatgaagagtttgttagaaggtggcagcttgcttgccaaggtgatatagctcatgtggtggttatgccaagtgttacaatcgagaagcttgataatttcctgaaagaccttgtcaaacacagattgatctggtacgaggatggatctcagcctccttgccttgcatcggaggtaggaaccaacaactgcatctgtccagctcacaagtgacggcaccatttctcatttgttggtattgttgttttctagtaagccacatctagtttaaattcctcatcactgtattcctgaacttggtttcaatcatcgtaaaattttgtcagtttctcttatttacaagttaaggtttcaaacagtgtttacaatttgtagctcaatctggagcatgatcaaccttcacttcgtcgttcgcaatcgtttaccgagttttagcattatcgtaacagcaagtatgtgccttaagccgctgatttagctgcgtgtttgatgatcggtgcttaatgcctaggaaaag

SEQ ID NO: 236 - protein, 482 aa, Arabidopsis thaliana
MVGSLESDQTLSMATLIEKLDILSDDFDPTAVVTEPLPPPVTNGIGADKGGGGGEREMVLGRNIHTTSLAVTEPEVNDEFTGDKEAYMASVLARYRKTLVERTKNHLGYPYNLDFDYGALGQLQHFSINNLGDPFIESNYGVHSRPFEVGVLDWFARLWEIERDDYWGYITNCGTEGNLHGILVGREMFPDGILYASRESHYSVFKAARMYRMECEKVDTLMSGEIDCDDLRKKLLANKDKPAILNVNIGTTVKGAVDDLDLVIKTLEECGFSHDRFYIHCDGALFGLMMPFVKRAPKVTFNKPIGSVSVSGHKFVGCPMPCGVQITRMEHIKVLSSNVEYLASRDATIMGSRNGHAPLFLWYTLNRKGYKGFQKEVQKCLRNAHYLKDRLREAGISAMLNELSSTVVFERPKDEEFVRRWQLACQGDIAHVVVMPSVTIEKLDNFLKDLVKHRLIWYEDGSQPPCLASEVGTNNCICPAHK

SEQ ID NO: 237 - DNA, 2274 bp, Escherichia coli
atgggaagcccctctctgtattctgcccgtaaaacaaccctggcgttggcagtcgccttaagtttcgcctggcaagcgccggtatttgcccacggtggtgaagcgcatatggtgccaatggataaaacgcttaaagaatttggtgccgatgtgcagtgggacgactacgcccagctctttaccctgattaaagatggcgcgtacgtgaaagtgaagcctggtgcgcaaacagcaattgttaatggtcagcctctggcactgcaagtaccggtagtgatgaaagacaataaagcctgggtttctgacacctttattaacgatgttttccagtccgggctggatcaaacctttcaggtagaaaagcgccctcacccacttaatgcgctaactgcggacgaaattaaacaggccgttgaaattgttaaagcttccgcggacttcaaacccaatacccgttttactgagatctccctgctaccgccagataaagaagctgtctgggcgtttgcgctggaaaacaaaccggttgaccagccgcgcaaagccgacgtcattatgctcgacggcaaacatatcatcgaagcggtggtggatctgcaaaacaacaaactgctctcctggcaacccattaaagacgcccacggtatggtgttgctggatgatttcgccagtgtgcagaacattattaacaacagtgaagaatttgccgctgccgtgaagaaacgcggtattactgatgcgaaaaaagtgattaccacgccgctgaccgtaggttatttcgatggtaaagatggcctgaaacaagatgcccggttgctcaaagtcatcagctatcttgatgtcggtgatggcaactactgggcacatcccatcgaaaacctggtggcggtcgttgatttagaacagaaaaaaatcgttaagattgaagaaggtccggtagttccggtgccaatgaccgcacgcccatttgatggccgtgaccgcgttgctccggcagttaagcctatgcaaatcattgagcctgaaggtaaaaattacaccattactggcgatatgattcactggcggaactgggattttcacctcagcatgaactctcgcgtcgggccgatgatctccaccgtgacttataacgacaatggcaccaaacgcaaagtcatgtacgaaggttctctcggcggcatgattgtgccttacggtgatcctgatattggctggtactttaaagcgtatctggactctggtgactacggtatgggcacgctaacctcaccaattgctcgtggtaaagatgccccgtctaacgcagtgctccttaatgaaaccatcgccgactacactggcgtgccgatggagatccctcgcgctatcgcggtatttgaacgttatgccgggccggagtataagcatcaggaaatgggccagcccaacgtcagtaccgaacgccgggagttagtggtgcgctggatcagtacagtgggtaactatgactacatttttgactggatcttccatgaaaacggcactattggcatcgatgccggtgctacgggcatcgaagcggtgaaaggtgttaaagcgaaaaccatgcacgatgagacggcgaaagatgacacgcgctacggcacgcttatcgatcacaatatcgtgggtactacacaccaacatatttataatttccgcctcgatctggatgtagatggcgagaataacagcctggtggcgatggacccagtggtaaaaccgaatactgccggtggcccacgcaccagtaccatgcaagttaatcagtacaacatcggcaatgaacaggatgccgcacagaaatttgatccgggcacgattcgtctgttgagtaacccgaacaaagagaaccgcatgggcaatccggtttcctatcaaattattccttatgcaggtggtactcacccggtagcaaaaggtgcccagttcgcgccggacgagtggatctatcatcgtttaagctttatggacaagcagctctgggtaacgcgttatcatcctggcgagcgtttcccggaaggcaaatatccgaaccgttctactcatgacaccggtcttggacaatacagtaaggataacgagtcgctggacaacaccgacgccgttgtctggatgaccaccggcaccacacatgtggcccgcgccgaagagtggccgattatgccgaccgaatgggtacatactctgctgaaaccatggaacttctttgacgaaacgccaacgctaggggcgctgaagaaagataagtga

SEQ ID NO: 238 - protein, 757 aa, Escherichia coli
MGSPSLYSARKTTLALAVALSFAWQAPVFAHGGEAHMVPMDKTLKEFGADVQWDDYAQLFTLIKDGAYVKVKPGAQTAIVNGQPLALQVPVVMKDNKAWVSDTFINDVFQSGLDQTFQVEKRPHPLNALTADEIKQAVEIVKASADFKPNTRFTEISLLPPDKEAVWAFALENKPVDQPRKADVIMLDGKHIIEAVVDLQNNKLLSWQPIKDAHGMVLLDDFASVQNIINNSEEFAAAVKKRGITDAKKVITTPLTVGYFDGKDGLKQDARLLKVISYLDVGDGNYWAHPIENLVAVVDLEQKKIVKIEEGPVVPVPMTARPFDGRDRVAPAVKPMQIIEPEGKNYTITGDMIHWRNWDFHLSMNSRVGPMISTVTYNDNGTKRKVMYEGSLGGMIVPYGDPDIGWYFKAYLDSGDYGMGTLTSPIARGKDAPSNAVLLNETIADYTGVPMEIPRAIAVFERYAGPEYKHQEMGQPNVSTERRELVVRWISTVGNYDYIFDWIFHENGTIGIDAGATGIEAVKGVKAKTMHDETAKDDTRYGTLIDHNIVGTTHQHIYNFRLDLDVDGENNSLVAMDPVVKPNTAGGPRTSTMQVNQYNIGNEQDAAQKFDPGTIRLLSNPNKENRMGNPVSYQIIPYAGGTHPVAKGAQFAPDEWIYHRLSFMDKQLWVTRYHPGERFPEGKYPNRSTHDTGLGQYSKDNESLDNTDAVVWMTTGTTHVARAEEWPIMPTEWVHTLLKPWNFFDETPTLGALKKDK

SEQ ID NO: 239 - DNA, 1218 bp, Escherichia coli
atgtcccccattgaaaaatccagcaaattagagaatgtctgttatgacatccgtggtccggtgctgaaagaagcaaaacgcctggaagaagaaggtaacaaggtactgaaactgaacatcggcaacccagccccgttcggttttgacgcgccagatgaaatcctcgttgacgtgatacgcaacctgcctaccgctcaagggtattgcgattccaaaggtctttactccgcgcgtaaagccatcatgcagcactaccaggctcgtggcatgcgtgatgttaccgtggaagatatttacatcggcaatggtgtatcggagcttatcgttcaggcaatgcaggcattgctgaacagcggggacgaaatgttggttcctgcaccagattacccactctggaccgcggcggtttcgctttccagcggtaaagcggtgcattatctttgcgatgaatcctctgactggttcccggacctcgatgatattcgcgctaaaattacgcctcgtacgcgtgggatcgttattatcaacccaaataacccaaccggcgcggtatattccaaagagcttttaatggagattgtggagattgcacgtcagcataatctcattatcttcgccgatgaaatttatgacaaaattctctacgacgacgctgagcatcactcaattgcgccgctggcacctgacctgctgaccattacctttaacggactgtcgaaaacgtaccgcgttgcaggcttccgtcaggggtggatggtgttgaacgggccgaaaaaacacgccaaaggctacatcgaaggtctggaaatgctggcttcaatgcgcctgtgtgctaacgttcctgcgcaacacgccattcagaccgcgctaggtggttatcagagcatcagtgaatttattacccctggcggtcgtctttatgagcagcgtaaccgcgcgtgggaactgatcaacgatattccgggcgtttcctgcgtgaaacctcgtggtgcgctgtatatgttcccgaaaatcgacgccaaacgctttaacattcacgacgatcagaaaatggtgttggatttcctgttgcaggaaaaagttctgttggtgcaagggacggcattcaactggccgtggccggatcacttccgcattgtcacgctaccgcgtgtcgatgatatcgagctgtctttgagcaagttcgcgcgtttcctttctggttatcatcagctgtaa

SEQ ID NO: 240 - protein, 405 aa, Escherichia coli
MSPIEKSSKLENVCYDIRGPVLKEAKRLEEEGNKVLKLNIGNPAPFGFDAPDEILVDVIRNLPTAQGYCDSKGLYSARKAIMQHYQARGMRDVTVEDIYIGNGVSELIVQAMQALLNSGDEMLVPAPDYPLWTAAVSLSSGKAVHYLCDESSDWFPDLDDIRAKITPRTRGIVIINPNNPTGAVYSKELLMEIVEIARQHNLIIFADEIYDKILYDDAEHHSIAPLAPDLLTITFNGLSKTYRVAGFRQGWMVLNGPKKHAKGYIEGLEMLASMRLCANVPAQHAIQTALGGYQSISEFITPGGRLYEQRNRAWELINDIPGVSCVKPRGALYMFPKIDAKRFNIHDDQKMVLDFLLQEKVLLVQGTAFNWPWPDHFRIVTLPRVDDIELSLSKFARFLSGYHQL

SEQ ID NO: 241 - DNA, 975 bp, Escherichia coli
atgaagccgtccgttatcctctacaaagccttacctgatgatttactgcaacgcctgcaagagcatttcaccgttcaccaggtggcaaacctcagcccacaaaccgtcgaacaaaatgcagcaatttttgccgaagctgaaggtttactgggttcaaacgagaatgtaaatgccgcattgctggaaaaaatgccgaaactgcgtgccacatcaacgatctccgtcggctatgacaattttgatgtcgatgcgcttaccgcccgaaaaattctgctgatgcacacgccaaccgtattaacagaaaccgtcgccgatacgctgatggcgctggtgttgtctaccgctcgtcgggttgtggaggtagcagaacgggtaaaagcaggcgaatggaccgcgagcataggcccggactggtacggcactgacgttcaccataaaacactgggcattgtcgggatgggacggatcggcatggcgctggcacaacgtgcgcactttggcttcaacatgcccatcctctataacgcgcgccgccaccataaagaagcagaagaacgcttcaacgcccgctactgcgatttggatactctgttacaagagtcagatttcgtttgcctgatcctgccgttaactgatgagacgcatcatctgtttggcgcagaacaattcgccaaaatgaaatcctccgccattttcattaatgccggacgtggcccggtggttgacgaaaatgcactgatcgcagcattgcagaaaggcgaaattcacgctgccgggctggatgtcttcgaacaagagccactgtccgtagattcgccgttgctctcaatggccaacgtcgtcgcagtaccgcatattggatctgccacccatgagacgcgttatggcatggccgcctgtgccgtggataatttgattgatgcgttacaaggaaaggttgagaagaactgtgtgaatccgcacgtcgcggactaa

SEQ ID NO: 242 - protein, 324 aa, Escherichia coli
MKPSVILYKALPDDLLQRLQEHFTVHQVANLSPQTVEQNAAIFAEAEGLLGSNENVNAALLEKMPKLRATSTISVGYDNFDVDALTARKILLMHTPTVLTETVADTLMALVLSTARRVVEVAERVKAGEWTASIGPDWYGTDVHHKTLGIVGMGRIGMALAQRAHFGFNMPILYNARRHHKEAEERFNARYCDLDTLLQESDFVCLILPLTDETHHLFGAEQFAKMKSSAIFINAGRGPVVDENALIAALQKGEIHAAGLDVFEQEPLSVDSPLLSMANVVAVPHIGSATHETRYGMAACAVDNLIDALQGKVEKNCVNPHVAD

SEQ ID NO: 243 - DNA, 1179 bp, Homo sapiens
atggcctctcacaagctgctggtgaccccccccaaggccctgctcaagcccctctccatccccaaccagctcctgctggggcctggtccttccaacctgcctcctcgcatcatggcagccggggggctgcagatgatcgggtccatgagcaaggatatgtaccagatcatggacgagatcaaggaaggcatccagtacgtgttccagaccaggaacccactcacactggtcatctctggctcgggacactgtgccctggaggccgccctggtcaatgtgctggagcctggggactccttcctggttggggccaatggcatttgggggcagcgagccgtggacatcggggagcgcataggagcccgagtgcacccgatgaccaaggaccctggaggccactacacactgcaggaggtggaggagggcctggcccagcacaagccagtgctgctgttcttaacccacggggagtcgtccaccggcgtgctgcagccccttgatggcttcggggaactctgccacaggtacaagtgcctgctcctggtggattcggtggcatccctgggcgggacccccctttacatggaccggcaaggcatcgacatcctgtactcgggctcccagaaggccctgaacgcccctccagggacctcgctcatctccttcagtgacaaggccaaaaagaagatgtactcccgcaagacgaagcccttctccttctacctggacatcaagtggctggccaacttctggggctgtgacgaccagcccaggatgtaccatcacacaatccccgtcatcagcctgtacagcctgagagagagcctggccctcattgcggaacagggcctggagaacagctggcgccagcaccgcgaggccgcggcgtatctgcatgggcgcctgcaggcactggggctgcagctcttcgtgaaggacccggcgctccggcttcccacagtcaccactgtggctgtacccgctggctatgactggagagacatcgtcagctacgtcatagaccacttcgacattgagatcatgggtggccttgggccctccacggggaaggtgctgcggatcggcctgctgggctgcaatgccacccgcgagaatgtggaccgcgtgacggaggccctgagggcggccctgcagcactgccccaagaagaagctgtga

SEQ ID NO: 244 - protein, 392 aa, Homo sapiens
MASHKLLVTPPKALLKPLSIPNQLLLGPGPSNLPPRIMAAGGLQMIGSMSKDMYQIMDEIKEGIQYVFQTRNPLTLVISGSGHCALEAALVNVLEPGDSFLVGANGIWGQRAVDIGERIGARVHPMTKDPGGHYTLQEVEEGLAQHKPVLLFLTHGESSTGVLQPLDGFGELCHRYKCLLLVDSVASLGGTPLYMDRQGIDILYSGSQKALNAPPGTSLISFSDKAKKKMYSRKTKPFSFYLDIKWLANFWGCDDQPRMYHHTIPVISLYSLRESLALIAEQGLENSWRQHREAAAYLHGRLQALGLQLFVKDPALRLPTVTTVAVPAGYDWRDIVSYVIDHFDIEIMGGLGPSTGKVLRIGLLGCNATRENVDRVTEALRAALQHCPKKKL

SEQ ID NO: 245 - DNA, 10 bp, Escherichia coli
aaaaaaaaaa

SEQ ID NO: 246 - protein, 6 aa, Escherichia coli
LANFWG

SEQ ID NO: 247 - DNA, 10 bp, Arabidopsis thaliana
aaaaaaaaaa

SEQ ID NO: 248 - protein, 5 aa, Arabidopsis thaliana
FVKDP

SEQ ID NO: 249 - DNA, 1146 bp, Escherichia coli
atgaagattgtcattgcgccagactcttttaaagagagcttaagtgcagaaaaatgttgtcaggcaattaaagccgggttttcgaccctctttcccgatgcgaactatatctgtttgccgatagcggatggcggcgaagggacggtggatgcgatggtcgccgcgacgggcggcaacatcgtgacgcttgaagtctgcgggccgatgggcgaaaaagtgaatgctttttatggccttaccggcgacgggaaaacggcggtgattgagatggcggcagcaagtggcctgatgctggtcgcgcctgaaaagcgtaatccgttgctggcctccagttttggtacgggggagttaattcgtcatgcgctggataacgacattcgccatattattctcggcattggcggcagtgcgacggtcgacggcggtatgggcatggcgcaggcgctcggtgtgcgtttccttgatgccgacggtcaggcgctggcggcaaacggtggtaatttagcgcgcgtggcaagcattgagatggatgaatgcgatccgcgtctggcgaattgccatattgaagtagcatgtgacgttgataacccgctggtaggggcacgcggcgcggcggcggtgtttggcccgcaaaaaggggcaacgccggagatggtcgaagaacttgaacaggggctgcaaaattacgcccgtgttttacaacagcaaactgaaattaatgtctgccagatggcgggcggcggcgctgcgggcggtatgggtattgcggcggcggtatttctcaatgcggatattaaaccgggcattgaaattgtgttgaatgcggtcaatcttgcgcaggcagtgcagggcgcagcactggtgattaccggggaagggcgcatcgactcgcaaacggcaggcggtaaagcgccgctgggtgtggcgtcggtggcgaagcagtttaatgtaccggtgattgggattgctggcgtattgggtgatggcgtggaagtggtgcaccagtacggcattgacgcggtattcagcattttgcctcgtctggcacctttagccgaagtgctcgccagcggtgaaaccaatctcttcaacagcgcgcgaaatattgcctgcgccattaaaataggtcagggaattaaaaactaa

SEQ ID NO: 250 - protein, 381 aa, Escherichia coli
MKIVIAPDSFKESLSAEKCCQAIKAGFSTLFPDANYICLPIADGGEGTVDAMVAATGGNIVTLEVCGPMGEKVNAFYGLTGDGKTAVIEMAAASGLMLVAPEKRNPLLASSFGTGELIRHALDNDIRHIILGIGGSATVDGGMGMAQALGVRFLDADGQALAANGGNLARVASIEMDECDPRLANCHIEVACDVDNPLVGARGAAAVFGPQKGATPEMVEELEQGLQNYARVLQQQTEINVCQMAGGGAAGGMGIAAAVFLNADIKPGIEIVLNAVNLAQAVQGAALVITGEGRIDSQTAGGKAPLGVASVAKQFNVPVIGIAGVLGDGVEVVHQYGIDAVFSILPRLAPLAEVLASGETNLFNSARNIACAIKIGQGIKN

SEQ ID NO: 251 - DNA, 1146 bp, Escherichia coli
atgaaaatcgtaatcgccccagactcttataaagaaagtttatctgccagcgaggttgcgcaggcgatagaaaaaggatttcgggaaatttttcctgatgcacagtacgtttctgttccggttgccgacggtggcgaaggaacggtggaagcgatgattgcagccacccagggggctgaacgtcacgcctgggttacagggccgctgggcgagaaagtgaatgccagttgggggatctccggcgatggcaaaaccgcgtttattgaaatggcggcggccagtgggctggagctggtacctgcggaaaaacgcgatccactcgtgaccacttcacgcggcacaggcgagttaatcctgcaggcgctggagagcggtgcgacaaacattattatcggcattggcggcagcgctacaaatgatggcggcgcaggcatggtacaggcgctgggggcgaaattatgcgacgccaacggcaatgaaattggttttggcggcggtagtcttaatactctgaatgatattgatatttccggcctcgatccgcgcttaaaagattgcgtcattcgcgtcgcttgtgatgtcaccaatccgctggtgggcgataacggcgcatcgcgcatctttggcccacaaaagggagccagtgaagcgatgattgttgagctggacaataacctctctcactatgccgaggtcattaaaaaagcgctgcatgttgatgtgaaagatgtccccggtgcaggagctgcgggtggtatgggcgcggcgctaatggcgtttcttggtgcggaactgaaaagtggtattgaaatcgtcactacggcgctgaatctggaggaacatattcacgattgtacgctggtgatcaccggtgaagggcgtattgacagccagagtattcacgggaaggtaccgattggtgtcgcaaacgtggcgaagaagtaccataaaccggtgattggcattgcgggtagcctgaccgatgatgttggcgttgtacatcagcatggcattgatgcggtcttcagcgtattgaccagcataggtacgttggacgaagcattccgcggggcttatgacaatatctgccgtgcttcacgtaatatcgccgcgacactggcgattggaatgcgcaacgcggggtga

SEQ ID NO: 252 - protein, 381 aa, Escherichia coli
MKIVIAPDSYKESLSASEVAQAIEKGFREIFPDAQYVSVPVADGGEGTVEAMIAATQGAERHAWVTGPLGEKVNASWGISGDGKTAFIEMAAASGLELVPAEKRDPLVTTSRGTGELILQALESGATNIIIGIGGSATNDGGAGMVQALGAKLCDANGNEIGFGGGSLNTLNDIDISGLDPRLKDCVIRVACDVTNPLVGDNGASRIFGPQKGASEAMIVELDNNLSHYAEVIKKALHVDVKDVPGAGAAGGMGAALMAFLGAELKSGIEIVTTALNLEEHIHDCTLVITGEGRIDSQSIHGKVPIGVANVAKKYHKPVIGIAGSLTDDVGVVHQHGIDAVFSVLTSIGTLDEAFRGAYDNICRASRNIAATLAIGMRNAG

SEQ ID NO: 253 - DNA, 450 bp, Escherichia coli
atgaaaaagattgcatttggctgtgatcatgtcggtttcattttaaaacatgaaatagtggcacatttagttgagcgtggcgttgaagtgattgataaaggaacctggtcgtcagagcgtactgattatccacattacgccagtcaagtcgcactggctgttgctggcggagaggttgatggcgggattttgatttgtggtactggcgtcggtatttcgatagcggcgaacaagtttgccggaattcgcgcggtcgtctgtagcgaaccttattccgcgcaactttcgcggcagcataacgacaccaacgtgctggcttttggttcacgagtggttggcctcgaactggcaaaaatgattgtggatgcgtggctgggcgcacagtacgaaggcggtcgtcatcaacaacgcgtggaggcgattacggcaatagagcagcggagaaattga

SEQ ID NO: 254 - protein, 149 aa, Escherichia coli
MKKIAFGCDHVGFILKHEIVAHLVERGVEVIDKGTWSSERTDYPHYASQVALAVAGGEVDGGILICGTGVGISIAANKFAGIRAVVCSEPYSAQLSRQHNDTNVLAFGSRVVGLELAKMIVDAWLGAQYEGGRHQQRVEAITAIEQRRN

SEQ ID NO: 255 - DNA, 780 bp, Escherichia coli
atgactgatctgaaagcaagcagcctgcgtgcactgaaattgatggacctgaccaccctgaatgacgacgacaccgacgagaaagtgatcgccctgtgtcatcaggccaaaactccggtcggcaataccgccgctatctgtatctatcctcgctttatcccgattgctcgcaaaactctgaaagagcagggcaccccggaaatccgtatcgctacggtaaccaacttcccacacggtaacgacgacatcgacatcgcgctggcagaaacccgtgcggcaatcgcctacggtgctgatgaagttgacgttgtgttcccgtaccgcgcgctgatggcgggtaacgagcaggttggttttgacctggtgaaagcctgtaaagaggcttgcgcggcagcgaatgtactgctgaaagtgatcatcgaaaccggcgaactgaaagacgaagcgctgatccgtaaagcgtctgaaatctccatcaaagcgggtgcggacttcatcaaaacctctaccggtaaagtggctgtgaacgcgacgccggaaagcgcgcgcatcatgatggaagtgatccgtgatatgggcgtagaaaaaaccgttggtttcaaaccggcgggcggcgtgcgtactgcggaagatgcgcagaaatatctcgccattgcagatgaactgttcggtgctgactgggcagatgcgcgtcactaccgctttggcgcttccagcctgctggcaagcctgctgaaagcgctgggtcacggcgacggtaagagcgccagcagctactaa

SEQ ID NO: 256 - protein, 259 aa, Escherichia coli
MTDLKASSLRALKLMDLTTLNDDDTDEKVIALCHQAKTPVGNTAAICIYPRFIPIARKTLKEQGTPEIRIATVTNFPHGNDDIDIALAETRAAIAYGADEVDVVFPYRALMAGNEQVGFDLVKACKEACAAANVLLKVIIETGELKDEALIRKASEISIKAGADFIKTSTGKVAVNATPESARIMMEVIRDMGVEKTVGFKPAGGVRTAEDAQKYLAIADELFGADWADARHYRFGASSLLASLLKALGHGDGKSASSY

SEQ ID NO: 257 - DNA, 41 bp, Artificial Sequence
  EcDERA C47N Primer 1
cggcaataccgccgctatcaatatctatcctcgctttatcc

SEQ ID NO: 258 - DNA, 41 bp, Artificial Sequence
  EcDERA C47N Primer 2
ggataaagcgaggatagatattgatagcggcggtattgccg

SEQ ID NO: 259 - DNA, 33 bp, Artificial Sequence
  EcDERA K201N Primer 1
gtagaaaaaaccgttggtttcaacccggcgggc

SEQ ID NO: 260 - DNA, 33 bp, Artificial Sequence
  EcDERA K201N Primer 2
gcccgccgggttgaaaccaacggttttttctac

SEQ ID NO: 261 - DNA, 30 bp, Artificial Sequence
  BcDERA C37N Primer 1
cttcgcggcggtgaacgttaacccgacctg

SEQ ID NO: 262 - DNA, 30 bp, Artificial Sequence
  BcDERA C37N Primer 2
caggtcgggttaacgttcaccgccgcgaag

SEQ ID NO: 263 - DNA, 25 bp, Artificial Sequence
  BcDERA K181N Primer 1
gcgggtgtgaacgcgagcggcggtg

SEQ ID NO: 264 - DNA, 25 bp, Artificial Sequence
  BcDERA K181N Primer 2
caccgccgctcgcgttcacacccgc

SEQ ID NO: 265 - DNA, 27 bp, Artificial Sequence
  E. Coli rbsK Primer 1
taagcaccatggcaatgcaaaacgcag

SEQ ID NO: 266 - DNA, 32 bp, Artificial Sequence
  E. Coli rbsK Primer 2
tgcttaaagcttcctctgcctgtctaaaaatg

SEQ ID NO: 267 - DNA, 37 bp, Artificial Sequence
  T. meritima XuK Primer 1
aggagatataccatggtggaagcggtgattttcgaca

SEQ ID NO: 268 - DNA, 40 bp, Artificial Sequence
  T. maritima XuK Primer 2
gtgcggccgcaagcttaagaacctctttgagaacgttcag

SEQ ID NO: 269 - DNA, 19 bp, Artificial Sequence
  E. coli AraB Primer 1
atggcgattgcaattggcc

SEQ ID NO: 270 - DNA, 30 bp, Artificial Sequence
  E. Coli AraB Primer 2
cgaattcgttatagagtcgcaacggcctgg

SEQ ID NO: 271 - DNA, 30 bp, Artificial Sequence
  E. coli aldA Primer 1
catatgtcagtacccgttcaacatcctatg

SEQ ID NO: 272 - DNA, 37 bp, Artificial Sequence
  E. Coli aldA Primer 2
gaattcgttaagactgtaaataaaccacctgggtctg

SEQ ID NO: 273 - DNA, 41 bp, Artificial Sequence; identical to SEQ ID NO: 257
  EcDERA C47N Foward Primer for Site Directed Mutagenesis

SEQ ID NO: 274 - DNA, 41 bp, Artificial Sequence; identical to SEQ ID NO: 258
  EcDERA C47N Reverse Primer for Site Directed Mutagenesis

SEQ ID NO: 275 - DNA, 45 bp, Artificial Sequence
  pZS2_J23101_J23119 FW
cgccccagctggcaattccgactaagaaacacagctaacaccacg

SEQ ID NO: 276 - DNA, 56 bp, Artificial Sequence
  pZS2_J23101_RV
gtggtggtacgcgtaccatgggatcggtaccgctagcataatacctaggactgagc

SEQ ID NO: 277 - DNA, 56 bp, Artificial Sequence
  pZS2_J23119_RV
gtggtggtacgcgtaccatgggatcggtaccgctagcattatacctaggactgagc

SEQ ID NO: 278 - DNA, 35 bp, Artificial Sequence
  pZA2_MCS_ori_FW
tcgaggtcgacggtatcgataagcttgatatcgaa

SEQ ID NO: 279 - DNA, 29 bp, Artificial Sequence
  pZA2_MCS_ori_RV
agctcgcttggactcctgttgatagatcc

SEQ ID NO: 280 - DNA, 33 bp, Artificial Sequence
  pZS2_Kan_Promoter_FW
gagtccaagcgagctctcgaaccccagagtccc

SEQ ID NO: 281 - DNA, 37 bp, Artificial Sequence
  pZS2_Kan_J23101_FW
taccgtcgacctcgacggtaccgctagcataatacct

SEQ ID NO: 282 - DNA, 37 bp, Artificial Sequence
  pZS2_Kan_J23119_RV
taccgtcgacctcgacggtaccgctagcattatacct

SEQ ID NO: 283 - DNA, 82 bp, Artificial Sequence
  DERA_assembly_J23101_RV
ggtattatgctagcgtaatagaaataattttgtttaactttaaggaggtttggaatggcaactgatctgaaagcaagcagcc

SEQ ID NO: 284 - DNA, 82 bp, Artificial Sequence
  DERA_assembly_J23119_RV
ggtataatgctagcgtaatagaaataattttgtttaactttaaggaggtttggaatggcaactgatctgaaagcaagcagcc

SEQ ID NO: 285 - DNA, 40 bp, Artificial Sequence
  DERA_assembly_RV
ccgtcgacctcgacgttagtagctgctggcgctcttaccg

SEQ ID NO: 286 - DNA, 672 bp, Bacillus caldolyticus DERA
atgacgatgaatatcgcgaaaatgatcgatcatacgctgctcaaaccggaagcgacagaacaacaaatcgtgcaactgtgcacggaagcaaagcaatacggctttgctgccgtgtgcgtcaacccaacgtgggtgaaaacggcggcgcgcgagctttccggcacggatgtccgcgtctgcacggtcatcggctttccacttggggcaacgacgccggaaacaaaggcgtttgaaacaacgaacgccatcgaaaacggcgctcgcgaagtcgacatggtgatcaacatcggtgcgttaaaaagcgggcaagacgagcttgtcgagcgcgacattcgtgcggttgtcgaagcggcggctggcagggcgcttgtcaaagtgatcgttgaaacggcgcttttgaccgatgaggaaaaagtgcgcgcctgccagctcgcagtgaaagccggcgctgattatgtgaaaacgtcgaccgggttttccggcggaggtgcgacggtggaggatgtggcgctgatgcggaaaacggtcggcgacagagcaggcgtcaaagcatcaggcggcgtccgtgactggaaaaccgctgaggcgatgatcaacgccggcgcgacgcgcatcggcacaagctctggggtggcgatcgtcaccggcgggacgggccgcgctgactactaa

SEQ ID NO: 287 - DNA, 674 bp, Artificial Sequence
  cDNA optimized sequence for BcDERA
ccatggcaaacatcgcgaagatgattgaccacaccctgctgaaaccggaggcgaccgaacagcaaatcgttcagctgtgcaccgaggcgaaacaatacggcttcgcggcggtgtgcgttaacccgacctgggttaagaccgcggcgcgtgaactgagcggtaccgacgtgcgtgtttgcaccgtgattggtttcccgctgggtgcgaccaccccggagaccaaagcgtttgaaaccaccaacgcgattgagaacggcgcgcgtgaagttgatatggtgatcaacattggcgcgctgaagagcggtcaggacgagctggttgagcgtgatattcgtgcggtggttgaggctgcggcgggtcgtgcgctggtgaaagttattgtggaaaccgcgctgctgaccgacgaggaaaaagtgcgtgcgtgccaactggcggttaaggcgggtgcggattacgtgaaaaccagcaccggttttagcggtggcggtgcgaccgttgaggatgtggcgctgatgcgtaagaccgttggcgatcgtgcgggtgtgaaagcgagcggcggtgttcgtgactggaagaccgcggaagcgatgatcaacgcgggtgcgacccgtattggtaccagcagcggtgttgcgattgtgaccggcggtaccggtcgtgcggattataagctt

SEQ ID NO: 288 - DNA, 1701 bp, Escherichia coli AraB
atggcgattgcaattggcctcgattttggcagtgattctgtgcgagctttggcggtggactgcgctaccggtgaagagatcgccaccagcgtagagtggtatccccgttggcagaaagggcaattttgtgatgccccgaataaccagttccgtcatcatccgcgtgactacattgagtcaatggaagcggcactgaaaaccgtgcttgcagagcttagcgtcgaacagcgcgcagctgtggtcgggattggcgttgacagtaccggctcgacgcccgcaccgattgatgccgacggaaacgtgctggcgctgcgcccggagtttgccgaaaacccgaacgcgatgttcgtattgtggaaagaccacactgcggttgaagaagcggaagagattacccgtttgtgccacgcgccgggcaacgttgactactcccgctacattggtggtatttattccagcgaatggttctgggcaaaaatcctgcatgtgactcgccaggacagcgccgtggcgcaatctgccgcatcgtggattgagctgtgcgactgggtgccagctctgctttccggtaccacccgcccgcaggatattcgtcgcggacgttgcagcgccgggcataaatctctgtggcacgaaagctggggcggcctgccgccagccagtttctttgatgagctggacccgatcctcaatcgccatttgccttccccgctgttcactgacacttggactgccgatattccggtgggcaccttatgcccggaatgggcgcagcgtctcggcctgcctgaaagcgtggtgatttccggcggcgcgtttgactgccatatgggcgcagttggcgcaggcgcacagcctaacgcactggtaaaagttatcggtacttccacctgcgacattctgattgccgacaaacagagcgttggcgagcgggcagttaaaggtatttgcggtcaggttgatggcagcgtggtgcctggatttatcggtctggaagcaggccaatcggcgtttggtgatatctacgcctggtttggtcgcgtactcggctggccgctggaacagcttgccgcccagcatccggaactgaaaacgcaaatcaacgccagccagaaacaactgcttccggcgctgaccgaagcatgggccaaaaatccgtctctggatcacctgccggtggtgctcgactggtttaacggccgccgcacaccgaacgctaaccaacgcctgaaaggggtgattaccgatcttaacctcgctaccgacgctccgctgctgttcggcggtttgattgctgccaccgcctttggcgcacgcgcaatcatggagtgctttaccgatcaggggatcgccgttaataacgtgatggcactgggcggcatcgcgcggaaaaaccaggtcattatgcaggcctgctgcgacgtgctgaatcgcccgctgcaaattgttgcctctgaccagtgctgtgcgctcggtgcggcgatttttgctgccgtcgccgcgaaagtgcacgcagacatcccatcagctcagcaaaaaatggccagtgcggtagagaaaaccctgcaaccgtgcagcgagcaggcacaacgctttgaacagctttatcgccgctatcagcaatgggcgatgagcgccgaacaacactatcttccaacttccgccccggcacaggctgcccaggccgttgcgactctataa

SEQ ID NO: 289 - DNA, 1440 bp, Escherichia coli aldA
atgtcagtacccgttcaacatcctatgtatatcgatggacagtttgttacctggcgtggagacgcatggattgatgtggtaaaccctgctacagaggctgtcatttcccgcatacccgatggtcaggccgaggatgcccgtaaggcaatcgatgcagcagaacgtgcacaaccagaatgggaagcgttgcctgctattgaacgcgccagttggttgcgcaaaatctccgccgggatccgcgaacgcgccagtgaaatcagtgcgctgattgttgaagaagggggcaagatccagcagctggctgaagtcgaagtggcttttactgccgactatatcgattacatggcggagtgggcacggcgttacgagggcgagattattcaaagcgatcgtccaggagaaaatattcttttgtttaaacgtgcgcttggtgtgactaccggcattctgccgtggaacttcccgttcttcctcattgcccgcaaaatggctcccgctcttttgaccggtaataccatcgtcattaaacctagtgaatttacgccaaacaatgcgattgcattcgccaaaatcgtcgatgaaataggccttccgcgcggcgtgtttaaccttgtactggggcgtggtgaaaccgttgggcaagaactggcgggtaacccaaaggtcgcaatggtcagtatgacaggcagcgtctctgcaggtgagaagatcatggcgactgcggcgaaaaacatcaccaaagtgtgtctggaattggggggtaaagcaccagctatcgtaatggacgatgccgatcttgaactggcagtcaaagccatcgttgattcacgcgtcattaatagtgggcaagtgtgtaactgtgcagaacgtgtttatgtacagaaaggcatttatgatcagttcgtcaatcggctgggtgaagcgatgcaggcggttcaatttggtaaccccgctgaacgcaacgacattgcgatggggccgttgattaacgccgcggcgctggaaagggtcgagcaaaaagtggcgcgcgcagtagaagaaggggcgagagtggcgttcggtggcaaagcggtagaggggaaaggatattattatccgccgacattgctgctggatgttcgccaggaaatgtcgattatgcatgaggaaacctttggcccggtgctgccagttgtcgcatttgacacgctggaagatgctatctcaatggctaatgacagtgattacggcctgacctcatcaatctatacccaaaatctgaacgtcgcgatgaaagccattaaagggctgaagtttggtgaaacttacatcaaccgtgaaaacttcgaagctatgcaaggcttccacgccggatggcgtaaatccggtattggcggcgcagatggtaaacatggcttgcatgaatatctgcagacccaggtggtttatttacagtcttaa

SEQ ID NO: 290 - DNA, 1869 bp, Escherichia coli rbsK
atgttgcaaggaattttagaaaccgtaccatctgacttgaaagatccgatatcattatggtttaagcaagaccgcaacccaaaaactatagaagaggtcaccgctctctgcaaaaaatccgactggaatgagttacacaaaagatttgattctagaattcagtttggcactgctggtttaagatcgcaaatgcaagctggctttagcaggatgaatactttagtagtcatacaagcgtctcagggattggcaacttatgtaagacaacagtttccagacaatttggtagctgttgtgggacacgatcatagattccattctaaggagttcgctagagctactgctgctgcatttcttttaaaaggatttaaggtacattatttgaatcctgaccacgaatttgttcatacccctttagttccctttgcagtggataagctaaaggcctccgttggcgtaatgataacagcaagtcacaacccaaaaatggataatggatataaagtatactattccaatggatgccaaatcattccacctcacgatcatgccatctctgattccattgacgcaaatttagaaccatgggccaatgtgtgggatttcgacgatgttctaaataaggctctcaaacaagggaaattgatgtattccagagaagaaatgctgaagttatatttagaggaggtttctaaaaatctggtagaaatcaacccattaaagcttgaagtaaaagccaaaccttggttcgtttacactccaatgcatggggttggatttgacattttcagcaccatcgtaaaaaaaacactgtgcctggtagaaggtaaggattacctatgtgttcctgaacaacaaaatccagatccttctttcccaactgttggatttcctaaccctgaagaaaaaggtgctttagacattggtataaacttggctgaaaaacatgacattgacttacttgttgccaacgaccctgacgctgatagattctctgttgctgttaaagatatgcagtcaggcgaatggcgacaactaacaggtaacgaaatcggttttctttttgcattttatgaatatcagaaatataaaagtatggacaaagaatttcagcacgttcatccgttggctatgttaaattcaacagtgtcttcacaaatgataaaaaaaatggcagaaatagaagggttccattatgaggatacattaacaggatttaagtggatcggaaatcgtgccatactcttggaaaagaaaggctattacgttccttttggattcgaggaagcaataggctacatgtttccagcaatggagcatgataaggatggtatcagtgcatccattgtcttcttgcaagcctactgtaagtggaaaatagaccacaatttggacccgctaaatgtcttagaaaatggcttcaaaaaatatggcgtgttcaaagagtacaatggctattatgtcgttccaaatccaactgttacaaaagatatatttgactacatcaggaatgtctacactcctgagggcgcgtcatatccttcatctattggtgaagaaatcgaagtactttactatcgagatttaaccactggttaccaatcggataccataaatcataaacctactctacccgtcgatcctacatcacaaatgataacagtatctgctagaccaagtaacggtagtgagaatgagcatatccgcttcactattcgcgggtccggaacagaaccaaaacttaaagtatatattgaagcttgcgcaaatgaagaacaaagagcctctttcttggcgaaattgacttggaatgtgctgagacgtgaatggtttagaccagatgaaatgaatatagttacaaaattttga

SEQ ID NO: 291 - DNA, 1479 bp, Thermotoga maritima MSB8 XuK
atgaacctgtacgtgggactcgatgtgggaacgaccggtgtcaagggaattcttgtgaacgagaagggagagattcttgcaacagcgaatgaaagactaaccatgttcactcctcagcctgcctgggcggagcaggatcccctctcctggtgggaggcggtgaaaaaaatactgaaaaacctctccgaaagatcgaaagaaatgggcggcaaaataagagcgatctctaccagcgggcagatgcacagtcttgtggcaatcgatgacaacggtaaagtcctgagaaacgctatcctctggtgcgatcagagaacatacaaagagtgcgaagaagccacccagatcctcggcggagaggaaaacgttctcaagctcgtcggaaatcccattttgcccggtttcacgctcccaaagatactctggatccgaaagcatgaacctgagatctacggaaaaatttcaaaaatcatgctgccaaaagatttcataaactacatgctcaccggtgaggtgaaaacggagcattccgacgcctccggaacggtgatgtacagtgtgtcaaagatggaatggaacaaggacgtattgaaagaactcaacataccggaaagtgttctcccagagataataccgtcgaacggcgtggttggaaatgtgaaacctgaagtagcgtcggatctcggtctctccgaagacacgcttgtgataggcggaggagccgacaacgcctgtgcagctcttggaatagccgtcgtagaaccgggtgacgtgatggtgagtcttggtacttcaggaaccgttctggcacccacaaaagggaatcagcccgatccaaagggtagagtacatttctttgcacacaccgttccagaaacaagataccacatgggtgtgatgctctccgctacctattcactggagtggttcaaggaaaaattcctgagcgaagattacgaaacaatcaacgaagaggtggataaaattcctgcaggatcaaacgggataatcttcctgccgtatctcaacggtgaaaggacaccacacagagatccattcgcgaggggtgttttcttcggtatatcctcgtacaacaccaagtgggatatggtgagagccatattcgaaggcgttgccttcggtatcaaagattcgttcgatatactgagagaactcaaggtggttctcaacagtgtgagaattacaggaggaggttcaaagagcagggtatggaacaaaatgctcgcagatatgacaggattgagaatacaaaaaccagccgtggatgaaggggcgtcttacggtgcagcgatcctcgcagtgtctggctcaatgggagaaaatcccgcgaaaatttcgaaagaatggtttcgcgtgaagagttacactgaccctgctgttgaaaacacagaaacctacgaaaaactacacgagaaattcaaaaaactctacacatctctcaaagagatgttcagatcttga

SEQ ID NO: 292 - DNA, 111 bp, Artificial Sequence
  J23101_promoter
ctaagaaacacagctaacaccacgtcgtccctatctgctgccctaggtctatgagtggttgctggataactttacagctagctcagtcctaggtattatgctagcggtacc

SEQ ID NO: 293 - DNA, 111 bp, Artificial Sequence
  J23119_promoter
ctaagaaacacagctaacaccacgtcgtccctatctgctgccctaggtctatgagtggttgctggataacttgacagctagctcagtcctaggtataatgctagcggtacc

SEQ ID NO: 294 - DNA, 780 bp, Artificial Sequence
  DERA_C47N_Escherichia_coli_MG1655
atgactgatctgaaagcaagcagcctgcgtgcactgaaattgatggacctgaccaccctgaatgacgacgacaccgacgagaaagtgatcgccctgtgtcatcaggccaaaactccggtcggcaataccgccgctatcaatatctatcctcgctttatcccgattgctcgcaaaactctgaaagagcagggcaccccggaaatccgtatcgctacggtaaccaacttcccacacggtaacgacgacatcgacatcgcgctggcagaaacccgtgcggcaatcgcctacggtgctgatgaagttgacgttgtgttcccgtaccgcgcgctgatggcgggtaacgagcaggttggttttgacctggtgaaagcctgtaaagaggcttgcgcggcagcgaatgtactgctgaaagtgatcatcgaaaccggcgaactgaaagacgaagcgctgatccgtaaagcgtctgaaatctccatcaaagcgggtgcggacttcatcaaaacctctaccggtaaagtggctgtgaacgcgacgccggaaagcgcgcgcatcatgatggaagtgatccgtgatatgggcgtagaaaaaaccgttggtttcaaaccggcgggcggcgtgcgtactgcggaagatgcgcagaaatatctcgccattgcagatgaactgttcggtgctgactgggcagatgcgcgtcactaccgctttggcgcttccagcctgctggcaagcctgctgaaagcgctgggtcacggcgacggtaagagcgccagcagctactaa

SEQ ID NO: 295 - DNA, 3075 bp, Artificial Sequence
  pZA2-J23119-DERA
tcgaggtcgacggtatcgataagcttgatatcgaattcctgcagcccgggggatcccatggtacgcgtaccaccaccaccaccactgagatccggctgctaacaaagcccgaaaggaagctgagttggctgctgccaccgctgagcaataactagcacgcgtgctagaggcatcaaataaaacgaaaggctcagtcgaaagactgggcctttcgttttatctgttgtttgtcggtgaacgctctcctgagtaggacaaatccgccgccctagacctagggatatattccgcttcctcgctcactgactcgctacgctcggtcgttcgactgcggcgagcggaaatggcttacgaacggggcggagatttcctggaagatgccaggaagatacttaacagggaagtgagagggccgcggcaaagccgtttttccataggctccgcccccctgacaagcatcacgaaatctgacgctcaaatcagtggtggcgaaacccgacaggactataaagataccaggcgtttccccctggcggctccctcgtgcgctctcctgttcctgcctttcggtttaccggtgtcattccgctgttatggccgcgtttgtctcattccacgcctgacactcagttccgggtaggcagttcgctccaagctggactgtatgcacgaaccccccgttcagtccgaccgctgcgccttatccggtaactatcgtcttgagtccaacccggaaagacatgcaaaagcaccactggcagcagccactggtaattgatttagaggagttagtcttgaagtcatgcgccggttaaggctaaactgaaaggacaagttttggtgactgcgctcctccaagccagttacctcggttcaaagagttggtagctcagagaaccttcgaaaaaccgccctgcaaggcggttttttcgttttcagagcaagagattacgcgcagaccaaaacgatctcaagaagatcatcttattaatcagataaaatattactagatttcagtgcaatttatctcttcaaatgtagcacctgaagtcagccccatacgatataagttgttactagtgcttggattctcaccaataaaaaacgcccggcggcaaccgagcgttctgaacaaatccagatggagttctgaggtcattactggatctatcaacaggagtccaagcgagctctcgaaccccagagtcccgctcagaagaactcgtcaagaaggcgatagaaggcgatgcgctgcgaatcgggagcggcgataccgtaaagcacgaggaagcggtcagcccattcgccgccaagctcttcagcaatatcacgggtagccaacgctatgtcctgatagcggtccgccacacccagccggccacagtcgatgaatccagaaaagcggccattttccaccatgatattcggcaagcaggcatcgccatgggtcacgacgagatcctcgccgtcgggcatgcgcgccttgagcctggcgaacagttcggctggcgcgagcccctgatgctcttcgtccagatcatcctgatcgacaagaccggcttccatccgagtacgtgctcgctcgatgcgatgtttcgcttggtggtcgaatgggcaggtagccggatcaagcgtatgcagccgccgcattgcatcagccatgatggatactttctcggcaggagcaaggtgagatgacaggagatcctgccccggcacttcgcccaatagcagccagtcccttcccgcttcagtgacaacgtcgagcacagctgcgcaaggaacgcccgtcgtggccagccacgatagccgcgctgcctcgtcctgcagttcattcagggcaccggacaggtcggtcttgacaaaaagaaccgggcgcccctgcgctgacagccggaacacggcggcatcagagcagccgattgtctgttgtgcccagtcatagccgaatagcctctccacccaagcggccggagaacctgcgtgcaatccatcttgttcaatcatgcgaaacgatcctcatcctgtctcttgatcagatcttgatcccctgcgccatcagatccttggcggcaagaaagccatccagtttactttgcagggcttcccaaccttaccagagggcgccccagctggcaattccgactaagaaacacagctaacaccacgtcgtccctatctgctgccctaggtctatgagtggttgctggataacttgacagctagctcagtcctaggtataatgctagcgtaatagaaataattttgtttaactttaaggaggtttggaatggcaactgatctgaaagcaagcagcctgcgtgcactgaaattgatggacctgaccaccctgaatgacgacgacaccgacgagaaagtgatcgccctgtgtcatcaggccaaaactccggtcggcaataccgccgctatcaatatctatcctcgctttatcccgattgctcgcaaaactctgaaagagcagggcaccccggaaatccgtatcgctacggtaaccaacttcccacacggtaacgacgacatcgacatcgcgctggcagaaacccgtgcggcaatcgcctacggtgctgatgaagttgacgttgtgttcccgtaccgcgcgctgatggcgggtaacgagcaggttggttttgacctggtgaaagcctgtaaagaggcttgcgcggcagcgaatgtactgctgaaagtgatcatcgaaaccggcgaactgaaagacgaagcgctgatccgtaaagcgtctgaaatctccatcaaagcgggtgcggacttcatcaaaacctctaccggtaaagtggctgtgaacgcgacgccggaaagcgcgcgcatcatgatggaagtgatccgtgatatgggcgtagaaaaaaccgttggtttcaaaccggcgggcggcgtgcgtactgcggaagatgcgcagaaatatctcgccattgcagatgaactgttcggtgctgactgggcagatgcgcgtcactaccgctttggcgcttccagcctgctggcaagcctgctgaaagcgctgggtcacggcgacggtaagagcgccagcagctactaacg

SEQ ID NO: 296 - DNA, 3075 bp, Artificial Sequence
  pZA2-J23101-DERA
tcgaggtcgacggtatcgataagcttgatatcgaattcctgcagcccgggggatcccatggtacgcgtaccaccaccaccaccactgagatccggctgctaacaaagcccgaaaggaagctgagttggctgctgccaccgctgagcaataactagcacgcgtgctagaggcatcaaataaaacgaaaggctcagtcgaaagactgggcctttcgttttatctgttgtttgtcggtgaacgctctcctgagtaggacaaatccgccgccctagacctagggatatattccgcttcctcgctcactgactcgctacgctcggtcgttcgactgcggcgagcggaaatggcttacgaacggggcggagatttcctggaagatgccaggaagatacttaacagggaagtgagagggccgcggcaaagccgtttttccataggctccgcccccctgacaagcatcacgaaatctgacgctcaaatcagtggtggcgaaacccgacaggactataaagataccaggcgtttccccctggcggctccctcgtgcgctctcctgttcctgcctttcggtttaccggtgtcattccgctgttatggccgcgtttgtctcattccacgcctgacactcagttccgggtaggcagttcgctccaagctggactgtatgcacgaaccccccgttcagtccgaccgctgcgccttatccggtaactatcgtcttgagtccaacccggaaagacatgcaaaagcaccactggcagcagccactggtaattgatttagaggagttagtcttgaagtcatgcgccggttaaggctaaactgaaaggacaagttttggtgactgcgctcctccaagccagttacctcggttcaaagagttggtagctcagagaaccttcgaaaaaccgccctgcaaggcggttttttcgttttcagagcaagagattacgcgcagaccaaaacgatctcaagaagatcatcttattaatcagataaaatattactagatttcagtgcaatttatctcttcaaatgtagcacctgaagtcagccccatacgatataagttgttactagtgcttggattctcaccaataaaaaacgcccggcggcaaccgagcgttctgaacaaatccagatggagttctgaggtcattactggatctatcaacaggagtccaagcgagctctcgaaccccagagtcccgctcagaagaactcgtcaagaaggcgatagaaggcgatgcgctgcgaatcgggagcggcgataccgtaaagcacgaggaagcggtcagcccattcgccgccaagctcttcagcaatatcacgggtagccaacgctatgtcctgatagcggtccgccacacccagccggccacagtcgatgaatccagaaaagcggccattttccaccatgatattcggcaagcaggcatcgccatgggtcacgacgagatcctcgccgtcgggcatgcgcgccttgagcctggcgaacagttcggctggcgcgagcccctgatgctcttcgtccagatcatcctgatcgacaagaccggcttccatccgagtacgtgctcgctcgatgcgatgtttcgcttggtggtcgaatgggcaggtagccggatcaagcgtatgcagccgccgcattgcatcagccatgatggatactttctcggcaggagcaaggtgagatgacaggagatcctgccccggcacttcgcccaatagcagccagtcccttcccgcttcagtgacaacgtcgagcacagctgcgcaaggaacgcccgtcgtggccagccacgatagccgcgctgcctcgtcctgcagttcattcagggcaccggacaggtcggtcttgacaaaaagaaccgggcgcccctgcgctgacagccggaacacggcggcatcagagcagccgattgtctgttgtgcccagtcatagccgaatagcctctccacccaagcggccggagaacctgcgtgcaatccatcttgttcaatcatgcgaaacgatcctcatcctgtctcttgatcagatcttgatcccctgcgccatcagatccttggcggcaagaaagccatccagtttactttgcagggcttcccaaccttaccagagggcgccccagctggcaattccgactaagaaacacagctaacaccacgtcgtccctatctgctgccctaggtctatgagtggttgctggataactttacagctagctcagtcctaggtattatgctagcgtaatagaaataattttgtttaactttaaggaggtttggaatggcaactgatctgaaagcaagcagcctgcgtgcactgaaattgatggacctgaccaccctgaatgacgacgacaccgacgagaaagtgatcgccctgtgtcatcaggccaaaactccggtcggcaataccgccgctatcaatatctatcctcgctttatcccgattgctcgcaaaactctgaaagagcagggcaccccggaaatccgtatcgctacggtaaccaacttcccacacggtaacgacgacatcgacatcgcgctggcagaaacccgtgcggcaatcgcctacggtgctgatgaagttgacgttgtgttcccgtaccgcgcgctgatggcgggtaacgagcaggttggttttgacctggtgaaagcctgtaaagaggcttgcgcggcagcgaatgtactgctgaaagtgatcatcgaaaccggcgaactgaaagacgaagcgctgatccgtaaagcgtctgaaatctccatcaaagcgggtgcggacttcatcaaaacctctaccggtaaagtggctgtgaacgcgacgccggaaagcgcgcgcatcatgatggaagtgatccgtgatatgggcgtagaaaaaaccgttggtttcaaaccggcgggcggcgtgcgtactgcggaagatgcgcagaaatatctcgccattgcagatgaactgttcggtgctgactgggcagatgcgcgtcactaccgctttggcgcttccagcctgctggcaagcctgctgaaagcgctgggtcacggcgacggtaagagcgccagcagctactaacg

SEQ ID NO: 297 - protein, 223 aa, Bacillus caldolyticus DERA
MTMNIAKMIDHTLLKPEATEQQIVQLCTEAKQYGFAAVCVNPTWVKTAARELSGTDVRVCTVIGFPLGATTPETKAFETTNAIENGAREVDMVINIGALKSGQDELVERDIRAVVEAAAGRALVKVIVETALLTDEEKVRACQLAVKAGADYVKTSTGFSGGGATVEDVALMRKTVGDRAGVKASGGVRDWKTAEAMINAGATRIGTSSGVAIVTGGTGRADY

SEQ ID NO: 298 - protein, 223 aa, Bacillus caldolyticus C37N DERA
MTMNIAKMIDHTLLKPEATEQQIVQLCTEAKQYGFAAVNVNPTWVKTAARELSGTDVRVCTVIGFPLGATTPETKAFETTNAIENGAREVDMVINIGALKSGQDELVERDIRAVVEAAAGRALVKVIVETALLTDEEKVRACQLAVKAGADYVKTSTGFSGGGATVEDVALMRKTVGDRAGVKASGGVRDWKTAEAMINAGATRIGTSSGVAIVTGGTGRADY

SEQ ID NO: 299 - protein, 259 aa, Escherichia coli
MTDLKASSLRALKLMDLTTLNDDDTDEKVIALCHQAKTPVGNTAAINIYPRFIPIARKTLKEQGTPEIRIATVTNFPHGNDDIDIALAETRAAIAYGADEVDVVFPYRALMAGNEQVGFDLVKACKEACAAANVLLKVIIETGELKDEALIRKASEISIKAGADFIKTSTGKVAVNATPESARIMMEVIRDMGVEKTVGFKPAGGVRTAEDAQKYLAIADELFGADWADARHYRFGASSLLASLLKALGHGDGKSASSY
